United States Patent Application Publication US 2021/0180091 A1 - sequence listing, part 11

SEQ ID NO: 224962 - DNA, 22 bp, Artificial Sequence
  Synthetic oligonucleotide; TTT chr2 60466984 60467005 60466989 60466984 -
gtccatttatacaaatgttttc

SEQ ID NO: 224963 - DNA, 22 bp, Artificial Sequence
  Synthetic oligonucleotide; TTG chr2 60466983 60467004 60466988 60466983 -
tccatttatacaaatgttttct

SEQ ID NO: 224964 - DNA, 22 bp, Artificial Sequence
  Synthetic oligonucleotide; TTT chr2 60466976 60466997 60466981 60466976 -
atacaaatgttttctgaaagat

SEQ ID NO: 224965 - DNA, 22 bp, Artificial Sequence
  Synthetic oligonucleotide; TTA chr2 60466975 60466996 60466980 60466975 -
tacaaatgttttctgaaagata

SEQ ID NO: 224966 - DNA, 22 bp, Artificial Sequence
  Synthetic oligonucleotide; TTT chr2 60466964 60466985 60466969 60466964 -
tctgaaagatactgttttagaa

SEQ ID NO: 224967 - DNA, 22 bp, Artificial Sequence
  Synthetic oligonucleotide; TTT chr2 60466963 60466984 60466968 60466963 -
ctgaaagatactgttttagaaa

SEQ ID NO: 224968 - DNA, 22 bp, Artificial Sequence
  Synthetic oligonucleotide; TTC chr2 60466962 60466983 60466967 60466962 -
tgaaagatactgttttagaaaa

SEQ ID NO: 224969 - DNA, 22 bp, Artificial Sequence
  Synthetic oligonucleotide; CTG chr2 60466960 60466981 60466965 60466960 -
aaagatactgttttagaaaata

SEQ ID NO: 224970 - DNA, 22 bp, Artificial Sequence
  Synthetic oligonucleotide; CTG chr2 60466950 60466971 60466955 60466950 -
ttttagaaaataatacagtttg

SEQ ID NO: 224971 - DNA, 22 bp, Artificial Sequence
  Synthetic oligonucleotide; TTT chr2 60466947 60466968 60466952 60466947 -
tagaaaataatacagtttgctt

SEQ ID NO: 224972 - DNA, 22 bp, Artificial Sequence
  Synthetic oligonucleotide; TTT chr2 60466946 60466967 60466951 60466946 -
agaaaataatacagtttgcttc

SEQ ID NO: 224973 - DNA, 22 bp, Artificial Sequence
  Synthetic oligonucleotide; TTA chr2 60466945 60466966 60466950 60466945 -
gaaaataatacagtttgcttct

SEQ ID NO: 224974 - DNA, 22 bp, Artificial Sequence
  Synthetic oligonucleotide; TTT chr2 60466929 60466950 60466934 60466929 -
gcttctctgtgtaggaacacat

SEQ ID NO: 224975 - DNA, 22 bp, Artificial Sequence
  Synthetic oligonucleotide; TTG chr2 60466928 60466949 60466933 60466928 -
cttctctgtgtaggaacacatg

SEQ ID NO: 224976 - DNA, 22 bp, Artificial Sequence
  Synthetic oligonucleotide; CTT chr2 60466925 60466946 60466930 60466925 -
ctctgtgtaggaacacatggta

SEQ ID NO: 224977 - DNA, 22 bp, Artificial Sequence
  Synthetic oligonucleotide; TTC chr2 60466924 60466945 60466929 60466924 -
tctgtgtaggaacacatggtat

SEQ ID NO: 224978 - DNA, 22 bp, Artificial Sequence
  Synthetic oligonucleotide; CTC chr2 60466922 60466943 60466927 60466922 -
tgtgtaggaacacatggtatga

SEQ ID NO: 224979 - DNA, 22 bp, Artificial Sequence
  Synthetic oligonucleotide; CTG chr2 60466920 60466941 60466925 60466920 -
tgtaggaacacatggtatgaat

SEQ ID NO: 224980 - DNA, 22 bp, Artificial Sequence
  Synthetic oligonucleotide; CTA chr2 60466886 60466907 60466891 60466886 -
aaaggttagggggtgggcagtg

SEQ ID NO: 224981 - DNA, 22 bp, Artificial Sequence
  Synthetic oligonucleotide; TTA chr2 60466878 60466899 60466883 60466878 -
gggggtgggcagtgattccacc

SEQ ID NO: 224982 - DNA, 22 bp, Artificial Sequence
  Synthetic oligonucleotide; TTC chr2 60466860 60466881 60466865 60466860 -
caccctaaacacaaaaaagcag

SEQ ID NO: 224983 - DNA, 22 bp, Artificial Sequence
  Synthetic oligonucleotide; CTA chr2 60466853 60466874 60466858 60466853 -
aacacaaaaaagcaggttcaag

SEQ ID NO: 224984 - DNA, 22 bp, Artificial Sequence
  Synthetic oligonucleotide; TTC chr2 60466834 60466855 60466839 60466834 -
aagaagaaaagaagtgtgacat

SEQ ID NO: 224985 - DNA, 22 bp, Artificial Sequence
  Synthetic oligonucleotide; CTA chr2 60466809 60466830 60466814 60466809 -
atttttatttgaaagtaaatga

SEQ ID NO: 224986 - DNA, 22 bp, Artificial Sequence
  Synthetic oligonucleotide; TTT chr2 60466805 60466826 60466810 60466805 -
ttatttgaaagtaaatgaaaaa

SEQ ID NO: 224987 - DNA, 22 bp, Artificial Sequence
  Synthetic oligonucleotide; TTT chr2 60466804 60466825 60466809 60466804 -
tatttgaaagtaaatgaaaaat

SEQ ID NO: 224988 - DNA, 22 bp, Artificial Sequence
  Synthetic oligonucleotide; TTT chr2 60466803 60466824 60466808 60466803 -
atttgaaagtaaatgaaaaata

SEQ ID NO: 224989 - DNA, 22 bp, Artificial Sequence
  Synthetic oligonucleotide; TTA chr2 60466802 60466823 60466807 60466802 -
tttgaaagtaaatgaaaaataa

SEQ ID NO: 224990 - DNA, 22 bp, Artificial Sequence
  Synthetic oligonucleotide; TTT chr2 60466799 60466820 60466804 60466799 -
gaaagtaaatgaaaaataacct

SEQ ID NO: 224991 - DNA, 22 bp, Artificial Sequence
  Synthetic oligonucleotide; TTG chr2 60466798 60466819 60466803 60466798 -
aaagtaaatgaaaaataacctg

SEQ ID NO: 224992 - DNA, 22 bp, Artificial Sequence
  Synthetic oligonucleotide; CTG chr2 60466776 60466797 60466781 60466776 -
ctgtggaaagaaaaaaaaagaa

SEQ ID NO: 224993 - DNA, 22 bp, Artificial Sequence
  Synthetic oligonucleotide; CTG chr2 60466773 60466794 60466778 60466773 -
tggaaagaaaaaaaaagaaaag

SEQ ID NO: 224994 - DNA, 22 bp, Artificial Sequence
  Synthetic oligonucleotide; TTA chr2 60466703 60466724 60466708 60466703 -
aggctctaagggggactgtttt

SEQ ID NO: 224995 - DNA, 22 bp, Artificial Sequence
  Synthetic oligonucleotide; CTC chr2 60466697 60466718 60466702 60466697 -
taagggggactgtttttagatg

SEQ ID NO: 224996 - DNA, 22 bp, Artificial Sequence
  Synthetic oligonucleotide; CTA chr2 60466695 60466716 60466700 60466695 -
agggggactgtttttagatggg

SEQ ID NO: 224997 - DNA, 22 bp, Artificial Sequence
  Synthetic oligonucleotide; CTG chr2 60466685 60466706 60466690 60466685 -
tttttagatgggagggagatga

SEQ ID NO: 224998 - DNA, 22 bp, Artificial Sequence
  Synthetic oligonucleotide; TTT chr2 60466682 60466703 60466687 60466682 -
ttagatgggagggagatgacac

SEQ ID NO: 224999 - DNA, 22 bp, Artificial Sequence
  Synthetic oligonucleotide; TTT chr2 60466681 60466702 60466686 60466681 -
tagatgggagggagatgacact

SEQ ID NO: 225000 - DNA, 22 bp, Artificial Sequence
  Synthetic oligonucleotide; TTT chr2 60466680 60466701 60466685 60466680 -
agatgggagggagatgacactt

SEQ ID NO: 225001 - DNA, 22 bp, Artificial Sequence
  Synthetic oligonucleotide; TTA chr2 60466679 60466700 60466684 60466679 -
gatgggagggagatgacactta

SEQ ID NO: 225002 - DNA, 22 bp, Artificial Sequence
  Synthetic oligonucleotide; CTT chr2 60466658 60466679 60466663 60466658 -
acccatcttgtaaatggtatct

SEQ ID NO: 225003 - DNA, 22 bp, Artificial Sequence
  Synthetic oligonucleotide; TTA chr2 60466657 60466678 60466662 60466657 -
cccatcttgtaaatggtatctg

SEQ ID NO: 225004 - DNA, 22 bp, Artificial Sequence
  Synthetic oligonucleotide; CTT chr2 60466649 60466670 60466654 60466649 -
gtaaatggtatctgaagagcag

SEQ ID NO: 225005 - DNA, 22 bp, Artificial Sequence
  Synthetic oligonucleotide; TTG chr2 60466648 60466669 60466653 60466648 -
taaatggtatctgaagagcagg

SEQ ID NO: 225006 - DNA, 22 bp, Artificial Sequence
  Synthetic oligonucleotide; CTG chr2 60466635 60466656 60466640 60466635 -
aagagcagggcatgcaccctga

SEQ ID NO: 225007 - DNA, 22 bp, Artificial Sequence
  Synthetic oligonucleotide; CTG chr2 60466614 60466635 60466619 60466614 -
agaccagattcaaagccagttg

SEQ ID NO: 225008 - DNA, 22 bp, Artificial Sequence
  Synthetic oligonucleotide; TTC chr2 60466603 60466624 60466608 60466603 -
aaagccagttgtttatttttgt

SEQ ID NO: 225009 - DNA, 22 bp, Artificial Sequence
  Synthetic oligonucleotide; TTG chr2 60466592 60466613 60466597 60466592 -
tttatttttgttaactcctagg

SEQ ID NO: 225010 - DNA, 22 bp, Artificial Sequence
  Synthetic oligonucleotide; TTT chr2 60466589 60466610 60466594 60466589 -
atttttgttaactcctaggtaa

SEQ ID NO: 225011 - DNA, 22 bp, Artificial Sequence
  Synthetic oligonucleotide; TTA chr2 60466588 60466609 60466593 60466588 -
tttttgttaactcctaggtaat

SEQ ID NO: 225012 - DNA, 22 bp, Artificial Sequence
  Synthetic oligonucleotide; TTT chr2 60466585 60466606 60466590 60466585 -
ttgttaactcctaggtaatcct

SEQ ID NO: 225013 - DNA, 22 bp, Artificial Sequence
  Synthetic oligonucleotide; TTT chr2 60466584 60466605 60466589 60466584 -
tgttaactcctaggtaatccta

SEQ ID NO: 225014 - DNA, 22 bp, Artificial Sequence
  Synthetic oligonucleotide; TTT chr2 60466583 60466604 60466588 60466583 -
gttaactcctaggtaatcctag

SEQ ID NO: 225015 - DNA, 22 bp, Artificial Sequence
  Synthetic oligonucleotide; TTG chr2 60466582 60466603 60466587 60466582 -
ttaactcctaggtaatcctagg

SEQ ID NO: 225016 - DNA, 22 bp, Artificial Sequence
  Synthetic oligonucleotide; TTA chr2 60466579 60466600 60466584 60466579 -
actcctaggtaatcctaggtaa

SEQ ID NO: 225017 - DNA, 22 bp, Artificial Sequence
  Synthetic oligonucleotide; CTC chr2 60466575 60466596 60466580 60466575 -
ctaggtaatcctaggtaacaaa

SEQ ID NO: 225018 - DNA, 22 bp, Artificial Sequence
  Synthetic oligonucleotide; CTA chr2 60466572 60466593 60466577 60466572 -
ggtaatcctaggtaacaaagag

SEQ ID NO: 225019 - DNA, 22 bp, Artificial Sequence
  Synthetic oligonucleotide; CTA chr2 60466562 60466583 60466567 60466562 -
ggtaacaaagagttattgtgtg

SEQ ID NO: 225020 - DNA, 22 bp, Artificial Sequence
  Synthetic oligonucleotide; TTA chr2 60466547 60466568 60466552 60466547 -
ttgtgtgaatttcataagccct

SEQ ID NO: 225021 - DNA, 22 bp, Artificial Sequence
  Synthetic oligonucleotide; TTG chr2 60466544 60466565 60466549 60466544 -
tgtgaatttcataagccctcag

SEQ ID NO: 225022 - DNA, 22 bp, Artificial Sequence
  Synthetic oligonucleotide; TTT chr2 60466535 60466556 60466540 60466535 -
cataagccctcaggtcctgagg

SEQ ID NO: 225023 - DNA, 22 bp, Artificial Sequence
  Synthetic oligonucleotide; TTC chr2 60466534 60466555 60466539 60466534 -
ataagccctcaggtcctgaggg

SEQ ID NO: 225024 - DNA, 22 bp, Artificial Sequence
  Synthetic oligonucleotide; CTC chr2 60466524 60466545 60466529 60466524 -
aggtcctgagggctgggtggtt

SEQ ID NO: 225025 - DNA, 22 bp, Artificial Sequence
  Synthetic oligonucleotide; CTG chr2 60466516 60466537 60466521 60466516 -
agggctgggtggttcaggggtt

SEQ ID NO: 225026 - DNA, 22 bp, Artificial Sequence
  Synthetic oligonucleotide; CTG chr2 60466509 60466530 60466514 60466509 -
ggtggttcaggggttaaaagca

SEQ ID NO: 225027 - DNA, 22 bp, Artificial Sequence
  Synthetic oligonucleotide; TTC chr2 60466501 60466522 60466506 60466501 -
aggggttaaaagcacctcatct

SEQ ID NO: 225028 - DNA, 22 bp, Artificial Sequence
  Synthetic oligonucleotide; TTA chr2 60466493 60466514 60466498 60466493 -
aaagcacctcatctgctccctt

SEQ ID NO: 225029 - DNA, 22 bp, Artificial Sequence
  Synthetic oligonucleotide; CTC chr2 60466483 60466504 60466488 60466483 -
atctgctcccttcccccaagct

SEQ ID NO: 225030 - DNA, 22 bp, Artificial Sequence
  Synthetic oligonucleotide; CTG chr2 60466478 60466499 60466483 60466478 -
ctcccttcccccaagctgggcc

SEQ ID NO: 225031 - DNA, 22 bp, Artificial Sequence
  Synthetic oligonucleotide; CTC chr2 60466475 60466496 60466480 60466475 -
ccttcccccaagctgggcctaa

SEQ ID NO: 225032 - DNA, 22 bp, Artificial Sequence
  Synthetic oligonucleotide; CTT chr2 60466471 60466492 60466476 60466471 -
cccccaagctgggcctaagcct

SEQ ID NO: 225033 - DNA, 22 bp, Artificial Sequence
  Synthetic oligonucleotide; TTC chr2 60466470 60466491 60466475 60466470 -
ccccaagctgggcctaagcctg

SEQ ID NO: 225034 - DNA, 22 bp, Artificial Sequence
  Synthetic oligonucleotide; CTG chr2 60466460 60466481 60466465 60466460 -
ggcctaagcctgggttaggtca

SEQ ID NO: 225035 - DNA, 22 bp, Artificial Sequence
  Synthetic oligonucleotide; CTA chr2 60466454 60466475 60466459 60466454 -
agcctgggttaggtcacagatt

SEQ ID NO: 225036 - DNA, 22 bp, Artificial Sequence
  Synthetic oligonucleotide; CTG chr2 60466448 60466469 60466453 60466448 -
ggttaggtcacagattgcagaa

SEQ ID NO: 225037 - DNA, 22 bp, Artificial Sequence
  Synthetic oligonucleotide; TTA chr2 60466443 60466464 60466448 60466443 -
ggtcacagattgcagaaggttt

SEQ ID NO: 225038 - DNA, 22 bp, Artificial Sequence
  Synthetic oligonucleotide; TTG chr2 60466431 60466452 60466436 60466431 -
cagaaggtttaggaggttgggc

SEQ ID NO: 225039 - DNA, 22 bp, Artificial Sequence
  Synthetic oligonucleotide; TTT chr2 60466421 60466442 60466426 60466421 -
aggaggttgggctcacggtttc

SEQ ID NO: 225040 - DNA, 22 bp, Artificial Sequence
  Synthetic oligonucleotide; TTA chr2 60466420 60466441 60466425 60466420 -
ggaggttgggctcacggtttct

SEQ ID NO: 225041 - DNA, 22 bp, Artificial Sequence
  Synthetic oligonucleotide; TTG chr2 60466412 60466433 60466417 60466412 -
ggctcacggtttctagtccctg

SEQ ID NO: 225042 - DNA, 22 bp, Artificial Sequence
  Synthetic oligonucleotide; CTC chr2 60466407 60466428 60466412 60466407 -
acggtttctagtccctgcatgc

SEQ ID NO: 225043 - DNA, 22 bp, Artificial Sequence
  Synthetic oligonucleotide; TTT chr2 60466400 60466421 60466405 60466400 -
ctagtccctgcatgctggctgg

SEQ ID NO: 225044 - DNA, 22 bp, Artificial Sequence
  Synthetic oligonucleotide; TTC chr2 60466399 60466420 60466404 60466399 -
tagtccctgcatgctggctggg

SEQ ID NO: 225045 - DNA, 22 bp, Artificial Sequence
  Synthetic oligonucleotide; CTA chr2 60466397 60466418 60466402 60466397 -
gtccctgcatgctggctgggtg

SEQ ID NO: 225046 - DNA, 22 bp, Artificial Sequence
  Synthetic oligonucleotide; CTG chr2 60466390 60466411 60466395 60466390 -
catgctggctgggtggggagag

SEQ ID NO: 225047 - DNA, 22 bp, Artificial Sequence
  Synthetic oligonucleotide; CTG chr2 60466383 60466404 60466388 60466383 -
gctgggtggggagagctctcct

SEQ ID NO: 225048 - DNA, 22 bp, Artificial Sequence
  Synthetic oligonucleotide; CTG chr2 60466379 60466400 60466384 60466379 -
ggtggggagagctctcctgttg

SEQ ID NO: 225049 - DNA, 22 bp, Artificial Sequence
  Synthetic oligonucleotide; CTC chr2 60466365 60466386 60466370 60466365 -
tcctgttgctgggggcatctgg

SEQ ID NO: 225050 - DNA, 22 bp, Artificial Sequence
  Synthetic oligonucleotide; CTC chr2 60466363 60466384 60466368 60466363 -
ctgttgctgggggcatctgggg

SEQ ID NO: 225051 - DNA, 22 bp, Artificial Sequence
  Synthetic oligonucleotide; CTG chr2 60466360 60466381 60466365 60466360 -
ttgctgggggcatctggggcct

SEQ ID NO: 225052 - DNA, 22 bp, Artificial Sequence
  Synthetic oligonucleotide; TTG chr2 60466357 60466378 60466362 60466357 -
ctgggggcatctggggcctgca

SEQ ID NO: 225053 - DNA, 22 bp, Artificial Sequence
  Synthetic oligonucleotide; CTG chr2 60466354 60466375 60466359 60466354 -
ggggcatctggggcctgcatgg

SEQ ID NO: 225054 - DNA, 22 bp, Artificial Sequence
  Synthetic oligonucleotide; CTG chr2 60466344 60466365 60466349 60466344 -
gggcctgcatggggctgtggaa

SEQ ID NO: 225055 - DNA, 22 bp, Artificial Sequence
  Synthetic oligonucleotide; CTG chr2 60466337 60466358 60466342 60466337 -
catggggctgtggaaacggagc

SEQ ID NO: 225056 - DNA, 22 bp, Artificial Sequence
  Synthetic oligonucleotide; CTG chr2 60466327 60466348 60466332 60466327 -
tggaaacggagccacttttgga

SEQ ID NO: 225057 - DNA, 22 bp, Artificial Sequence
  Synthetic oligonucleotide; CTT chr2 60466310 60466331 60466315 60466310 -
ttggagggaagggatagaaggg

SEQ ID NO: 225058 - DNA, 22 bp, Artificial Sequence
  Synthetic oligonucleotide; TTT chr2 60466309 60466330 60466314 60466309 -
tggagggaagggatagaaggga

SEQ ID NO: 225059 - DNA, 22 bp, Artificial Sequence
  Synthetic oligonucleotide; TTT chr2 60466308 60466329 60466313 60466308 -
ggagggaagggatagaagggag

SEQ ID NO: 225060 - DNA, 22 bp, Artificial Sequence
  Synthetic oligonucleotide; TTG chr2 60466307 60466328 60466312 60466307 -
gagggaagggatagaagggagt

SEQ ID NO: 225061 - DNA, 22 bp, Artificial Sequence
  Synthetic oligonucleotide; TTG chr2 60466283 60466304 60466288 60466283 -
agcagttcagaggagggtggag

SEQ ID NO: 225062 - DNA, 22 bp, Artificial Sequence
  Synthetic oligonucleotide; TTC chr2 60466275 60466296 60466280 60466275 -
agaggagggtggagttgagagg

SEQ ID NO: 225063 - DNA, 22 bp, Artificial Sequence
  Synthetic oligonucleotide; TTG chr2 60466258 60466279 60466263 60466258 -
agaggccaagggctgttgccag

SEQ ID NO: 225064 - DNA, 22 bp, Artificial Sequence
  Synthetic oligonucleotide; CTG chr2 60466243 60466264 60466248 60466243 -
ttgccagggaaacatagttctc

SEQ ID NO: 225065 - DNA, 22 bp, Artificial Sequence
  Synthetic oligonucleotide; TTG chr2 60466240 60466261 60466245 60466240 -
ccagggaaacatagttctcggt

SEQ ID NO: 225066 - DNA, 22 bp, Artificial Sequence
  Synthetic oligonucleotide; TTC chr2 60466223 60466244 60466228 60466223 -
tcggtcttcagcctggtcttcc

SEQ ID NO: 225067 - DNA, 22 bp, Artificial Sequence
  Synthetic oligonucleotide; CTC chr2 60466221 60466242 60466226 60466221 -
ggtcttcagcctggtcttcctg

SEQ ID NO: 225068 - DNA, 22 bp, Artificial Sequence
  Synthetic oligonucleotide; CTT chr2 60466215 60466236 60466220 60466215 -
cagcctggtcttcctgagggct

SEQ ID NO: 225069 - DNA, 22 bp, Artificial Sequence
  Synthetic oligonucleotide; TTC chr2 60466214 60466235 60466219 60466214 -
agcctggtcttcctgagggctg

SEQ ID NO: 225070 - DNA, 22 bp, Artificial Sequence
  Synthetic oligonucleotide; CTG chr2 60466208 60466229 60466213 60466208 -
gtcttcctgagggctgggagtt

SEQ ID NO: 225071 - DNA, 22 bp, Artificial Sequence
  Synthetic oligonucleotide; CTT chr2 60466203 60466224 60466208 60466203 -
cctgagggctgggagtttgatt

SEQ ID NO: 225072 - DNA, 22 bp, Artificial Sequence
  Synthetic oligonucleotide; TTC chr2 60466202 60466223 60466207 60466202 -
ctgagggctgggagtttgattt

SEQ ID NO: 225073 - DNA, 22 bp, Artificial Sequence
  Synthetic oligonucleotide; CTG chr2 60466199 60466220 60466204 60466199 -
agggctgggagtttgatttgac

SEQ ID NO: 225074 - DNA, 22 bp, Artificial Sequence
  Synthetic oligonucleotide; CTG chr2 60466192 60466213 60466197 60466192 -
ggagtttgatttgactggtagg

SEQ ID NO: 225075 - DNA, 22 bp, Artificial Sequence
  Synthetic oligonucleotide; TTT chr2 60466185 60466206 60466190 60466185 -
gatttgactggtaggaaagtct

SEQ ID NO: 225076 - DNA, 22 bp, Artificial Sequence
  Synthetic oligonucleotide; TTG chr2 60466184 60466205 60466189 60466184 -
atttgactggtaggaaagtctg

SEQ ID NO: 225077 - DNA, 22 bp, Artificial Sequence
  Synthetic oligonucleotide; TTT chr2 60466180 60466201 60466185 60466180 -
gactggtaggaaagtctgagct

SEQ ID NO: 225078 - DNA, 22 bp, Artificial Sequence
  Synthetic oligonucleotide; TTG chr2 60466179 60466200 60466184 60466179 -
actggtaggaaagtctgagctt

SEQ ID NO: 225079 - DNA, 22 bp, Artificial Sequence
  Synthetic oligonucleotide; CTG chr2 60466175 60466196 60466180 60466175 -
gtaggaaagtctgagcttgata

SEQ ID NO: 225080 - DNA, 22 bp, Artificial Sequence
  Synthetic oligonucleotide; CTG chr2 60466162 60466183 60466167 60466162 -
agcttgatagggaacccctgtc

SEQ ID NO: 225081 - DNA, 22 bp, Artificial Sequence
  Synthetic oligonucleotide; CTT chr2 60466157 60466178 60466162 60466157 -
gatagggaacccctgtcctctc

SEQ ID NO: 225082 - DNA, 22 bp, Artificial Sequence
  Synthetic oligonucleotide; TTG chr2 60466156 60466177 60466161 60466156 -
atagggaacccctgtcctctcc

SEQ ID NO: 225083 - DNA, 22 bp, Artificial Sequence
  Synthetic oligonucleotide; CTG chr2 60466142 60466163 60466147 60466142 -
tcctctcccaccttcccacaaa

SEQ ID NO: 225084 - DNA, 22 bp, Artificial Sequence
  Synthetic oligonucleotide; CTC chr2 60466137 60466158 60466142 60466137 -
tcccaccttcccacaaagggag

SEQ ID NO: 225085 - DNA, 22 bp, Artificial Sequence
  Synthetic oligonucleotide; CTC chr2 60466135 60466156 60466140 60466135 -
ccaccttcccacaaagggaggg

SEQ ID NO: 225086 - DNA, 22 bp, Artificial Sequence
  Synthetic oligonucleotide; CTT chr2 60466128 60466149 60466133 60466128 -
cccacaaagggagggtacatag

SEQ ID NO: 225087 - DNA, 22 bp, Artificial Sequence
  Synthetic oligonucleotide; TTC chr2 60466127 60466148 60466132 60466127 -
ccacaaagggagggtacatagt

SEQ ID NO: 225088 - DNA, 22 bp, Artificial Sequence
  Synthetic oligonucleotide; TTT chr2 60466103 60466124 60466108 60466103 -
gctggtgcccctgctggcagga

SEQ ID NO: 225089 - DNA, 22 bp, Artificial Sequence
  Synthetic oligonucleotide; TTG chr2 60466102 60466123 60466107 60466102 -
ctggtgcccctgctggcaggac

SEQ ID NO: 225090 - DNA, 22 bp, Artificial Sequence
  Synthetic oligonucleotide; CTG chr2 60466099 60466120 60466104 60466099 -
gtgcccctgctggcaggaccaa

SEQ ID NO: 225091 - DNA, 22 bp, Artificial Sequence
  Synthetic oligonucleotide; CTG chr2 60466090 60466111 60466095 60466090 -
ctggcaggaccaatttaggagt

SEQ ID NO: 225092 - DNA, 22 bp, Artificial Sequence
  Synthetic oligonucleotide; CTG chr2 60466087 60466108 60466092 60466087 -
gcaggaccaatttaggagtgac

SEQ ID NO: 225093 - DNA, 22 bp, Artificial Sequence
  Synthetic oligonucleotide; TTT chr2 60466074 60466095 60466079 60466074 -
aggagtgaccagaacaaggtat

SEQ ID NO: 225094 - DNA, 22 bp, Artificial Sequence
  Synthetic oligonucleotide; TTA chr2 60466073 60466094 60466078 60466073 -
ggagtgaccagaacaaggtatg

SEQ ID NO: 225095 - DNA, 22 bp, Artificial Sequence
  Synthetic oligonucleotide; TTG chr2 60466038 60466059 60466043 60466038 -
tgggggtccagaaagctctaga

SEQ ID NO: 225096 - DNA, 22 bp, Artificial Sequence
  Synthetic oligonucleotide; CTC chr2 60466020 60466041 60466025 60466020 -
tagaacaaacctgatgcccatt

SEQ ID NO: 225097 - DNA, 22 bp, Artificial Sequence
  Synthetic oligonucleotide; CTA chr2 60466018 60466039 60466023 60466018 -
gaacaaacctgatgcccattcc

SEQ ID NO: 225098 - DNA, 22 bp, Artificial Sequence
  Synthetic oligonucleotide; CTG chr2 60466007 60466028 60466012 60466007 -
atgcccattccacttggcggca

SEQ ID NO: 225099 - DNA, 22 bp, Artificial Sequence
  Synthetic oligonucleotide; TTC chr2 60465997 60466018 60466002 60465997 -
cacttggcggcattaacctgct

SEQ ID NO: 225100 - DNA, 22 bp, Artificial Sequence
  Synthetic oligonucleotide; CTT chr2 60465992 60466013 60465997 60465992 -
ggcggcattaacctgctgcccc

SEQ ID NO: 225101 - DNA, 22 bp, Artificial Sequence
  Synthetic oligonucleotide; TTG chr2 60465991 60466012 60465996 60465991 -
gcggcattaacctgctgcccct

SEQ ID NO: 225102 - DNA, 22 bp, Artificial Sequence
  Synthetic oligonucleotide; TTA chr2 60465982 60466003 60465987 60465982 -
acctgctgcccctggcttccag

SEQ ID NO: 225103 - DNA, 22 bp, Artificial Sequence
  Synthetic oligonucleotide; CTG chr2 60465977 60465998 60465982 60465977 -
ctgcccctggcttccagagctc

SEQ ID NO: 225104 - DNA, 22 bp, Artificial Sequence
  Synthetic oligonucleotide; CTG chr2 60465974 60465995 60465979 60465974 -
cccctggcttccagagctcata

SEQ ID NO: 225105 - DNA, 22 bp, Artificial Sequence
  Synthetic oligonucleotide; CTG chr2 60465968 60465989 60465973 60465968 -
gcttccagagctcatagcactt

SEQ ID NO: 225106 - DNA, 22 bp, Artificial Sequence
  Synthetic oligonucleotide; CTT chr2 60465964 60465985 60465969 60465964 -
ccagagctcatagcacttccct

SEQ ID NO: 225107 - DNA, 22 bp, Artificial Sequence
  Synthetic oligonucleotide; TTC chr2 60465963 60465984 60465968 60465963 -
cagagctcatagcacttccctg

SEQ ID NO: 225108 - DNA, 22 bp, Artificial Sequence
  Synthetic oligonucleotide; CTC chr2 60465955 60465976 60465960 60465955 -
atagcacttccctgtggccact

SEQ ID NO: 225109 - DNA, 22 bp, Artificial Sequence
  Synthetic oligonucleotide; CTT chr2 60465946 60465967 60465951 60465946 -
ccctgtggccactctgctgtgt

SEQ ID NO: 225110 - DNA, 22 bp, Artificial Sequence
  Synthetic oligonucleotide; TTC chr2 60465945 60465966 60465950 60465945 -
cctgtggccactctgctgtgtg

SEQ ID NO: 225111 - DNA, 22 bp, Artificial Sequence
  Synthetic oligonucleotide; CTG chr2 60465941 60465962 60465946 60465941 -
tggccactctgctgtgtgccag

SEQ ID NO: 225112 - DNA, 22 bp, Artificial Sequence
  Synthetic oligonucleotide; CTC chr2 60465932 60465953 60465937 60465932 -
tgctgtgtgccagtcacccctg

SEQ ID NO: 225113 - DNA, 22 bp, Artificial Sequence
  Synthetic oligonucleotide; CTG chr2 60465930 60465951 60465935 60465930 -
ctgtgtgccagtcacccctgct

SEQ ID NO: 225114 - DNA, 22 bp, Artificial Sequence
  Synthetic oligonucleotide; CTG chr2 60465927 60465948 60465932 60465927 -
tgtgccagtcacccctgctctt

SEQ ID NO: 225115 - DNA, 22 bp, Artificial Sequence
  Synthetic oligonucleotide; CTG chr2 60465910 60465931 60465915 60465910 -
ctctttaactagagcctccttt

SEQ ID NO: 225116 - DNA, 22 bp, Artificial Sequence
  Synthetic oligonucleotide; CTC chr2 60465907 60465928 60465912 60465907 -
tttaactagagcctccttttgg

SEQ ID NO: 225117 - DNA, 22 bp, Artificial Sequence
  Synthetic oligonucleotide; CTT chr2 60465905 60465926 60465910 60465905 -
taactagagcctccttttggcc

SEQ ID NO: 225118 - DNA, 22 bp, Artificial Sequence
  Synthetic oligonucleotide; TTT chr2 60465904 60465925 60465909 60465904 -
aactagagcctccttttggcct

SEQ ID NO: 225119 - DNA, 22 bp, Artificial Sequence
  Synthetic oligonucleotide; TTA chr2 60465903 60465924 60465908 60465903 -
actagagcctccttttggcctg

SEQ ID NO: 225120 - DNA, 22 bp, Artificial Sequence
  Synthetic oligonucleotide; CTA chr2 60465899 60465920 60465904 60465899 -
gagcctccttttggcctgggtt

SEQ ID NO: 225121 - DNA, 22 bp, Artificial Sequence
  Synthetic oligonucleotide; CTC chr2 60465892 60465913 60465897 60465892 -
cttttggcctgggttaaggcct

SEQ ID NO: 225122 - DNA, 22 bp, Artificial Sequence
  Synthetic oligonucleotide; CTT chr2 60465889 60465910 60465894 60465889 -
ttggcctgggttaaggcctgga

SEQ ID NO: 225123 - DNA, 22 bp, Artificial Sequence
  Synthetic oligonucleotide; TTT chr2 60465888 60465909 60465893 60465888 -
tggcctgggttaaggcctggac

SEQ ID NO: 225124 - DNA, 22 bp, Artificial Sequence
  Synthetic oligonucleotide; TTT chr2 60465887 60465908 60465892 60465887 -
ggcctgggttaaggcctggact

SEQ ID NO: 225125 - DNA, 22 bp, Artificial Sequence
  Synthetic oligonucleotide; TTG chr2 60465886 60465907 60465891 60465886 -
gcctgggttaaggcctggactg

SEQ ID NO: 225126 - DNA, 22 bp, Artificial Sequence
  Synthetic oligonucleotide; CTG chr2 60465881 60465902 60465886 60465881 -
ggttaaggcctggactgggacc

SEQ ID NO: 225127 - DNA, 22 bp, Artificial Sequence
  Synthetic oligonucleotide; TTA chr2 60465876 60465897 60465881 60465876 -
aggcctggactgggaccttcct

SEQ ID NO: 225128 - DNA, 22 bp, Artificial Sequence
  Synthetic oligonucleotide; CTG chr2 60465869 60465890 60465874 60465869 -
gactgggaccttcctctggaag

SEQ ID NO: 225129 - DNA, 22 bp, Artificial Sequence
  Synthetic oligonucleotide; CTG chr2 60465864 60465885 60465869 60465864 -
ggaccttcctctggaagccgtt

SEQ ID NO: 225130 - DNA, 22 bp, Artificial Sequence
  Synthetic oligonucleotide; CTT chr2 60465857 60465878 60465862 60465857 -
cctctggaagccgttcggggtg

SEQ ID NO: 225131 - DNA, 22 bp, Artificial Sequence
  Synthetic oligonucleotide; TTC chr2 60465856 60465877 60465861 60465856 -
ctctggaagccgttcggggtgt

SEQ ID NO: 225132 - DNA, 22 bp, Artificial Sequence
  Synthetic oligonucleotide; CTC chr2 60465853 60465874 60465858 60465853 -
tggaagccgttcggggtgtgta

SEQ ID NO: 225133 - DNA, 22 bp, Artificial Sequence
  Synthetic oligonucleotide; CTG chr2 60465851 60465872 60465856 60465851 -
gaagccgttcggggtgtgtaat

SEQ ID NO: 225134 - DNA, 22 bp, Artificial Sequence
  Synthetic oligonucleotide; TTC chr2 60465841 60465862 60465846 60465841 -
ggggtgtgtaatgtggttagtc

SEQ ID NO: 225135 - DNA, 22 bp, Artificial Sequence
  Synthetic oligonucleotide; TTA chr2 60465822 60465843 60465827 60465822 -
gtcattaccctcagtaattaat

SEQ ID NO: 225136 - DNA, 22 bp, Artificial Sequence
  Synthetic oligonucleotide; TTA chr2 60465815 60465836 60465820 60465815 -
ccctcagtaattaatcacccct

SEQ ID NO: 225137 - DNA, 22 bp, Artificial Sequence
  Synthetic oligonucleotide; CTC chr2 60465810 60465831 60465815 60465810 -
agtaattaatcacccctggtag

SEQ ID NO: 225138 - DNA, 22 bp, Artificial Sequence
  Synthetic oligonucleotide; TTA chr2 60465802 60465823 60465807 60465802 -
atcacccctggtagtaatgaaa

SEQ ID NO: 225139 - DNA, 22 bp, Artificial Sequence
  Synthetic oligonucleotide; CTG chr2 60465792 60465813 60465797 60465792 -
gtagtaatgaaaactcacattc

SEQ ID NO: 225140 - DNA, 22 bp, Artificial Sequence
  Synthetic oligonucleotide; CTC chr2 60465776 60465797 60465781 60465776 -
acattcacattcgacctgatag

SEQ ID NO: 225141 - DNA, 22 bp, Artificial Sequence
  Synthetic oligonucleotide; TTC chr2 60465770 60465791 60465775 60465770 -
acattcgacctgatagtttaca

SEQ ID NO: 225142 - DNA, 22 bp, Artificial Sequence
  Synthetic oligonucleotide; TTC chr2 60465764 60465785 60465769 60465764 -
gacctgatagtttacagagggc

SEQ ID NO: 225143 - DNA, 22 bp, Artificial Sequence
  Synthetic oligonucleotide; CTG chr2 60465758 60465779 60465763 60465758 -
atagtttacagagggcttttat

SEQ ID NO: 225144 - DNA, 22 bp, Artificial Sequence
  Synthetic oligonucleotide; TTT chr2 60465751 60465772 60465756 60465751 -
acagagggcttttatatacttc

SEQ ID NO: 225145 - DNA, 22 bp, Artificial Sequence
  Synthetic oligonucleotide; TTA chr2 60465750 60465771 60465755 60465750 -
cagagggcttttatatacttct

SEQ ID NO: 225146 - DNA, 22 bp, Artificial Sequence
  Synthetic oligonucleotide; CTT chr2 60465740 60465761 60465745 60465740 -
ttatatacttctgtcatttgaa

SEQ ID NO: 225147 - DNA, 22 bp, Artificial Sequence
  Synthetic oligonucleotide; TTT chr2 60465739 60465760 60465744 60465739 -
tatatacttctgtcatttgaac

SEQ ID NO: 225148 - DNA, 22 bp, Artificial Sequence
  Synthetic oligonucleotide; TTT chr2 60465738 60465759 60465743 60465738 -
atatacttctgtcatttgaact

SEQ ID NO: 225149 - DNA, 22 bp, Artificial Sequence
  Synthetic oligonucleotide; TTA chr2 60465737 60465758 60465742 60465737 -
tatacttctgtcatttgaactt

SEQ ID NO: 225150 - DNA, 22 bp, Artificial Sequence
  Synthetic oligonucleotide; CTT chr2 60465730 60465751 60465735 60465730 -
ctgtcatttgaacttcccaaca

SEQ ID NO: 225151 - DNA, 22 bp, Artificial Sequence
  Synthetic oligonucleotide; TTC chr2 60465729 60465750 60465734 60465729 -
tgtcatttgaacttcccaacaa

SEQ ID NO: 225152 - DNA, 22 bp, Artificial Sequence
  Synthetic oligonucleotide; CTG chr2 60465727 60465748 60465732 60465727 -
tcatttgaacttcccaacaatt

SEQ ID NO: 225153 - DNA, 22 bp, Artificial Sequence
  Synthetic oligonucleotide; TTT chr2 60465721 60465742 60465726 60465721 -
gaacttcccaacaattcttaca

SEQ ID NO: 225154 - DNA, 22 bp, Artificial Sequence
  Synthetic oligonucleotide; TTG chr2 60465720 60465741 60465725 60465720 -
aacttcccaacaattcttacag

SEQ ID NO: 225155 - DNA, 22 bp, Artificial Sequence
  Synthetic oligonucleotide; CTT chr2 60465715 60465736 60465720 60465715 -
cccaacaattcttacaggtact

SEQ ID NO: 225156 - DNA, 22 bp, Artificial Sequence
  Synthetic oligonucleotide; TTC chr2 60465714 60465735 60465719 60465714 -
ccaacaattcttacaggtactg

SEQ ID NO: 225157 - DNA, 22 bp, Artificial Sequence
  Synthetic oligonucleotide; TTC chr2 60465704 60465725 60465709 60465704 -
ttacaggtactgtttttatgct

SEQ ID NO: 225158 - DNA, 22 bp, Artificial Sequence
  Synthetic oligonucleotide; CTT chr2 60465702 60465723 60465707 60465702 -
acaggtactgtttttatgctca

SEQ ID NO: 225159 - DNA, 22 bp, Artificial Sequence
  Synthetic oligonucleotide; TTA chr2 60465701 60465722 60465706 60465701 -
caggtactgtttttatgctcat

SEQ ID NO: 225160 - DNA, 22 bp, Artificial Sequence
  Synthetic oligonucleotide; CTG chr2 60465692 60465713 60465697 60465692 -
tttttatgctcattttacagat

SEQ ID NO: 225161 - DNA, 22 bp, Artificial Sequence
  Synthetic oligonucleotide; TTT chr2 60465689 60465710 60465694 60465689 -
ttatgctcattttacagatagg

SEQ ID NO: 225162 - DNA, 22 bp, Artificial Sequence
  Synthetic oligonucleotide; TTT chr2 60465688 60465709 60465693 60465688 -
tatgctcattttacagatagga

SEQ ID NO: 225163 - DNA, 22 bp, Artificial Sequence
  Synthetic oligonucleotide; TTT chr2 60465687 60465708 60465692 60465687 -
atgctcattttacagataggaa

SEQ ID NO: 225164 - DNA, 22 bp, Artificial Sequence
  Synthetic oligonucleotide; TTA chr2 60465686 60465707 60465691 60465686 -
tgctcattttacagataggaat

SEQ ID NO: 225165 - DNA, 22 bp, Artificial Sequence
  Synthetic oligonucleotide; CTC chr2 60465681 60465702 60465686 60465681 -
attttacagataggaattccaa

SEQ ID NO: 225166 - DNA, 22 bp, Artificial Sequence
  Synthetic oligonucleotide; TTT chr2 60465677 60465698 60465682 60465677 -
tacagataggaattccaagact

SEQ ID NO: 225167 - DNA, 22 bp, Artificial Sequence
  Synthetic oligonucleotide; TTT chr2 60465676 60465697 60465681 60465676 -
acagataggaattccaagactc

SEQ ID NO: 225168 - DNA, 22 bp, Artificial Sequence
  Synthetic oligonucleotide; TTA chr2 60465675 60465696 60465680 60465675 -
cagataggaattccaagactca

SEQ ID NO: 225169 - DNA, 22 bp, Artificial Sequence
  Synthetic oligonucleotide; TTC chr2 60465662 60465683 60465667 60465662 -
caagactcagagaaatcaaatg

SEQ ID NO: 225170 - DNA, 22 bp, Artificial Sequence
  Synthetic oligonucleotide; CTC chr2 60465654 60465675 60465659 60465654 -
agagaaatcaaatgactatccc

SEQ ID NO: 225171 - DNA, 22 bp, Artificial Sequence
  Synthetic oligonucleotide; CTA chr2 60465636 60465657 60465641 60465636 -
tcccagagttacaatctagtgg

SEQ ID NO: 225172 - DNA, 22 bp, Artificial Sequence
  Synthetic oligonucleotide; TTA chr2 60465625 60465646 60465630 60465625 -
caatctagtggataatagagct

SEQ ID NO: 225173 - DNA, 22 bp, Artificial Sequence
  Synthetic oligonucleotide; CTA chr2 60465618 60465639 60465623 60465618 -
gtggataatagagctaggcctc

SEQ ID NO: 225174 - DNA, 22 bp, Artificial Sequence
  Synthetic oligonucleotide; CTA chr2 60465602 60465623 60465607 60465602 -
ggcctccagtctcagacctcct

SEQ ID NO: 225175 - DNA, 22 bp, Artificial Sequence
  Synthetic oligonucleotide; CTC chr2 60465596 60465617 60465601 60465596 -
cagtctcagacctccttgttct

SEQ ID NO: 225176 - DNA, 22 bp, Artificial Sequence
  Synthetic oligonucleotide; CTC chr2 60465589 60465610 60465594 60465589 -
agacctccttgttcttctgaat

SEQ ID NO: 225177 - DNA, 22 bp, Artificial Sequence
  Synthetic oligonucleotide; CTC chr2 60465582 60465603 60465587 60465582 -
cttgttcttctgaatcttgagg

SEQ ID NO: 225178 - DNA, 22 bp, Artificial Sequence
  Synthetic oligonucleotide; CTT chr2 60465579 60465600 60465584 60465579 -
gttcttctgaatcttgaggctt

SEQ ID NO: 225179 - DNA, 22 bp, Artificial Sequence
  Synthetic oligonucleotide; TTG chr2 60465578 60465599 60465583 60465578 -
ttcttctgaatcttgaggctta

SEQ ID NO: 225180 - DNA, 22 bp, Artificial Sequence
  Synthetic oligonucleotide; TTC chr2 60465575 60465596 60465580 60465575 -
ttctgaatcttgaggcttagat

SEQ ID NO: 225181 - DNA, 22 bp, Artificial Sequence
  Synthetic oligonucleotide; CTT chr2 60465573 60465594 60465578 60465573 -
ctgaatcttgaggcttagatca

SEQ ID NO: 225182 - DNA, 22 bp, Artificial Sequence
  Synthetic oligonucleotide; TTC chr2 60465572 60465593 60465577 60465572 -
tgaatcttgaggcttagatcac

SEQ ID NO: 225183 - DNA, 22 bp, Artificial Sequence
  Synthetic oligonucleotide; CTG chr2 60465570 60465591 60465575 60465570 -
aatcttgaggcttagatcacat

SEQ ID NO: 225184 - DNA, 22 bp, Artificial Sequence
  Synthetic oligonucleotide; CTT chr2 60465564 60465585 60465569 60465564 -
gaggcttagatcacatgacttt

SEQ ID NO: 225185 - DNA, 22 bp, Artificial Sequence
  Synthetic oligonucleotide; TTG chr2 60465563 60465584 60465568 60465563 -
aggcttagatcacatgactttt

SEQ ID NO: 225186 - DNA, 22 bp, Artificial Sequence
  Synthetic oligonucleotide; CTT chr2 60465557 60465578 60465562 60465557 -
agatcacatgactttttcacat

SEQ ID NO: 225187 - DNA, 22 bp, Artificial Sequence
  Synthetic oligonucleotide; TTA chr2 60465556 60465577 60465561 60465556 -
gatcacatgactttttcacatt

SEQ ID NO: 225188 - DNA, 22 bp, Artificial Sequence
  Synthetic oligonucleotide; CTT chr2 60465543 60465564 60465548 60465543 -
tttcacattggtgacatactag

SEQ ID NO: 225189 - DNA, 22 bp, Artificial Sequence
  Synthetic oligonucleotide; TTT chr2 60465542 60465563 60465547 60465542 -
ttcacattggtgacatactaga

SEQ ID NO: 225190 - DNA, 22 bp, Artificial Sequence
  Synthetic oligonucleotide; TTT chr2 60465541 60465562 60465546 60465541 -
tcacattggtgacatactagaa

SEQ ID NO: 225191 - DNA, 22 bp, Artificial Sequence
  Synthetic oligonucleotide; TTT chr2 60465540 60465561 60465545 60465540 -
cacattggtgacatactagaaa

SEQ ID NO: 225192 - DNA, 22 bp, Artificial Sequence
  Synthetic oligonucleotide; TTC chr2 60465539 60465560 60465544 60465539 -
acattggtgacatactagaaat

SEQ ID NO: 225193 - DNA, 22 bp, Artificial Sequence
  Synthetic oligonucleotide; TTG chr2 60465533 60465554 60465538 60465533 -
gtgacatactagaaatgggggt

SEQ ID NO: 225194 - DNA, 22 bp, Artificial Sequence
  Synthetic oligonucleotide; CTA chr2 60465522 60465543 60465527 60465522 -
gaaatgggggtcattccttccc

SEQ ID NO: 225195 - DNA, 22 bp, Artificial Sequence
  Synthetic oligonucleotide; TTC chr2 60465506 60465527 60465511 60465506 -
cttcccataaagtaaaatgaaa

SEQ ID NO: 225196 - DNA, 22 bp, Artificial Sequence
  Synthetic oligonucleotide; CTT chr2 60465503 60465524 60465508 60465503 -
cccataaagtaaaatgaaataa

SEQ ID NO: 225197 - DNA, 22 bp, Artificial Sequence
  Synthetic oligonucleotide; TTC chr2 60465502 60465523 60465507 60465502 -
ccataaagtaaaatgaaataaa

SEQ ID NO: 225198 - DNA, 22 bp, Artificial Sequence
  Synthetic oligonucleotide; CTA chr2 60465458 60465479 60465463 60465458 -
atagctgattttaacccttttg

SEQ ID NO: 225199 - DNA, 22 bp, Artificial Sequence
  Synthetic oligonucleotide; CTG chr2 60465451 60465472 60465456 60465451 -
attttaacccttttgatgtctc

SEQ ID NO: 225200 - DNA, 22 bp, Artificial Sequence
  Synthetic oligonucleotide; TTT chr2 60465447 60465468 60465452 60465447 -
taacccttttgatgtctcaagt

SEQ ID NO: 225201 - DNA, 22 bp, Artificial Sequence
  Synthetic oligonucleotide; TTT chr2 60465446 60465467 60465451 60465446 -
aacccttttgatgtctcaagtt

SEQ ID NO: 225202 - DNA, 22 bp, Artificial Sequence
  Synthetic oligonucleotide; TTA chr2 60465445 60465466 60465450 60465445 -
acccttttgatgtctcaagttc

SEQ ID NO: 225203 - DNA, 22 bp, Artificial Sequence
  Synthetic oligonucleotide; CTT chr2 60465439 60465460 60465444 60465439 -
ttgatgtctcaagttcctatgc

SEQ ID NO: 225204 - DNA, 22 bp, Artificial Sequence
  Synthetic oligonucleotide; TTT chr2 60465438 60465459 60465443 60465438 -
tgatgtctcaagttcctatgct

SEQ ID NO: 225205 - DNA, 22 bp, Artificial Sequence
  Synthetic oligonucleotide; TTT chr2 60465437 60465458 60465442 60465437 -
gatgtctcaagttcctatgctt

SEQ ID NO: 225206 - DNA, 22 bp, Artificial Sequence
  Synthetic oligonucleotide; TTG chr2 60465436 60465457 60465441 60465436 -
atgtctcaagttcctatgctta

SEQ ID NO: 225207 - DNA, 22 bp, Artificial Sequence
  Synthetic oligonucleotide; CTC chr2 60465429 60465450 60465434 60465429 -
aagttcctatgcttaggggcca

SEQ ID NO: 225208 - DNA, 22 bp, Artificial Sequence
  Synthetic oligonucleotide; TTC chr2 60465423 60465444 60465428 60465423 -
ctatgcttaggggccaggtgtc

SEQ ID NO: 225209 - DNA, 22 bp, Artificial Sequence
  Synthetic oligonucleotide; CTA chr2 60465420 60465441 60465425 60465420 -
tgcttaggggccaggtgtcagt

SEQ ID NO: 225210 - DNA, 22 bp, Artificial Sequence
  Synthetic oligonucleotide; CTT chr2 60465415 60465436 60465420 60465415 -
aggggccaggtgtcagtttatt

SEQ ID NO: 225211 - DNA, 22 bp, Artificial Sequence
  Synthetic oligonucleotide; TTA chr2 60465414 60465435 60465419 60465414 -
ggggccaggtgtcagtttattg

SEQ ID NO: 225212 - DNA, 22 bp, Artificial Sequence
  Synthetic oligonucleotide; TTT chr2 60465396 60465417 60465401 60465396 -
attgctctaaatcaaaacaatc

SEQ ID NO: 225213 - DNA, 22 bp, Artificial Sequence
  Synthetic oligonucleotide; TTA chr2 60465395 60465416 60465400 60465395 -
ttgctctaaatcaaaacaatcc

SEQ ID NO: 225214 - DNA, 22 bp, Artificial Sequence
  Synthetic oligonucleotide; TTG chr2 60465392 60465413 60465397 60465392 -
ctctaaatcaaaacaatccccg

SEQ ID NO: 225215 - DNA, 22 bp, Artificial Sequence
  Synthetic oligonucleotide; CTC chr2 60465389 60465410 60465394 60465389 -
taaatcaaaacaatccccgtaa

SEQ ID NO: 225216 - DNA, 22 bp, Artificial Sequence
  Synthetic oligonucleotide; CTA chr2 60465387 60465408 60465392 60465387 -
aatcaaaacaatccccgtaaat

SEQ ID NO: 225217 - DNA, 22 bp, Artificial Sequence
  Synthetic oligonucleotide; CTC chr2 60465351 60465372 60465356 60465351 -
tcaaattgagaagttgattttc

SEQ ID NO: 225218 - DNA, 22 bp, Artificial Sequence
  Synthetic oligonucleotide; CTC chr2 60465349 60465370 60465354 60465349 -
aaattgagaagttgattttcat

SEQ ID NO: 225219 - DNA, 22 bp, Artificial Sequence
  Synthetic oligonucleotide; TTG chr2 60465343 60465364 60465348 60465343 -
agaagttgattttcatcagagt

SEQ ID NO: 225220 - DNA, 22 bp, Artificial Sequence
  Synthetic oligonucleotide; TTG chr2 60465335 60465356 60465340 60465335 -
attttcatcagagtaaatgaag

SEQ ID NO: 225221 - DNA, 22 bp, Artificial Sequence
  Synthetic oligonucleotide; TTT chr2 60465331 60465352 60465336 60465331 -
tcatcagagtaaatgaagaata

SEQ ID NO: 225222 - DNA, 22 bp, Artificial Sequence
  Synthetic oligonucleotide; TTT chr2 60465330 60465351 60465335 60465330 -
catcagagtaaatgaagaatat

SEQ ID NO: 225223 - DNA, 22 bp, Artificial Sequence
  Synthetic oligonucleotide; TTC chr2 60465329 60465350 60465334 60465329 -
atcagagtaaatgaagaatatt

SEQ ID NO: 225224 - DNA, 22 bp, Artificial Sequence
  Synthetic oligonucleotide; TTA chr2 60465306 60465327 60465311 60465306 -
ttatattttacacatcaataaa

SEQ ID NO: 225225 - DNA, 22 bp, Artificial Sequence
  Synthetic oligonucleotide; TTA chr2 60465303 60465324 60465308 60465303 -
tattttacacatcaataaatca

SEQ ID NO: 225226 - DNA, 22 bp, Artificial Sequence
  Synthetic oligonucleotide; TTT chr2 60465298 60465319 60465303 60465298 -
tacacatcaataaatcaatgta

SEQ ID NO: 225227 - DNA, 22 bp, Artificial Sequence
  Synthetic oligonucleotide; TTT chr2 60465297 60465318 60465302 60465297 -
acacatcaataaatcaatgtag

SEQ ID NO: 225228 - DNA, 22 bp, Artificial Sequence
  Synthetic oligonucleotide; TTA chr2 60465296 60465317 60465301 60465296 -
cacatcaataaatcaatgtagc

SEQ ID NO: 225229 - DNA, 22 bp, Artificial Sequence
  Synthetic oligonucleotide; CTA chr2 60465270 60465291 60465275 60465270 -
attttgccacacaggaaatcaa

SEQ ID NO: 225230 - DNA, 22 bp, Artificial Sequence
  Synthetic oligonucleotide; TTT chr2 60465266 60465287 60465271 60465266 -
tgccacacaggaaatcaattcc

SEQ ID NO: 225231 - DNA, 22 bp, Artificial Sequence
  Synthetic oligonucleotide; TTT chr2 60465265 60465286 60465270 60465265 -
gccacacaggaaatcaattcca

SEQ ID NO: 225232 - DNA, 22 bp, Artificial Sequence
  Synthetic oligonucleotide; TTG chr2 60465264 60465285 60465269 60465264 -
ccacacaggaaatcaattccag

SEQ ID NO: 225233 - DNA, 22 bp, Artificial Sequence
  Synthetic oligonucleotide; TTC chr2 60465245 60465266 60465250 60465245 -
cagtctttctaaatcatcaaag

SEQ ID NO: 225234 - DNA, 22 bp, Artificial Sequence
  Synthetic oligonucleotide; CTT chr2 60465238 60465259 60465243 60465238 -
tctaaatcatcaaagatgttat

SEQ ID NO: 225235 - DNA, 22 bp, Artificial Sequence
  Synthetic oligonucleotide; TTT chr2 60465237 60465258 60465242 60465237 -
ctaaatcatcaaagatgttatg

SEQ ID NO: 225236 - DNA, 22 bp, Artificial Sequence
  Synthetic oligonucleotide; TTC chr2 60465236 60465257 60465241 60465236 -
taaatcatcaaagatgttatga

SEQ ID NO: 225237 - DNA, 22 bp, Artificial Sequence
  Synthetic oligonucleotide; CTA chr2 60465234 60465255 60465239 60465234 -
aatcatcaaagatgttatgaac

SEQ ID NO: 225238 - DNA, 22 bp, Artificial Sequence
  Synthetic oligonucleotide; TTA chr2 60465217 60465238 60465222 60465217 -
tgaacaaagtaatttcacaaat

SEQ ID NO: 225239 - DNA, 22 bp, Artificial Sequence
  Synthetic oligonucleotide; TTT chr2 60465202 60465223 60465207 60465202 -
cacaaattatggcaagtaacac

SEQ ID NO: 225240 - DNA, 22 bp, Artificial Sequence
  Synthetic oligonucleotide; TTC chr2 60465201 60465222 60465206 60465201 -
acaaattatggcaagtaacaca

SEQ ID NO: 225241 - DNA, 22 bp, Artificial Sequence
  Synthetic oligonucleotide; TTA chr2 60465193 60465214 60465198 60465193 -
tggcaagtaacacatttattga

SEQ ID NO: 225242 - DNA, 22 bp, Artificial Sequence
  Synthetic oligonucleotide; TTT chr2 60465176 60465197 60465181 60465176 -
attgatgactgcagtttaggaa

SEQ ID NO: 225243 - DNA, 22 bp, Artificial Sequence
  Synthetic oligonucleotide; TTA chr2 60465175 60465196 60465180 60465175 -
ttgatgactgcagtttaggaat

SEQ ID NO: 225244 - DNA, 22 bp, Artificial Sequence
  Synthetic oligonucleotide; TTG chr2 60465172 60465193 60465177 60465172 -
atgactgcagtttaggaattta

SEQ ID NO: 225245 - DNA, 22 bp, Artificial Sequence
  Synthetic oligonucleotide; CTG chr2 60465165 60465186 60465170 60465165 -
cagtttaggaatttagaatctg

SEQ ID NO: 225246 - DNA, 22 bp, Artificial Sequence
  Synthetic oligonucleotide; TTT chr2 60465159 60465180 60465164 60465159 -
aggaatttagaatctgtgagca

SEQ ID NO: 225247 - DNA, 22 bp, Artificial Sequence
  Synthetic oligonucleotide; TTA chr2 60465158 60465179 60465163 60465158 -
ggaatttagaatctgtgagcac

SEQ ID NO: 225248 - DNA, 22 bp, Artificial Sequence
  Synthetic oligonucleotide; TTT chr2 60465151 60465172 60465156 60465151 -
agaatctgtgagcactgtaata

SEQ ID NO: 225249 - DNA, 22 bp, Artificial Sequence
  Synthetic oligonucleotide; TTA chr2 60465150 60465171 60465155 60465150 -
gaatctgtgagcactgtaatat

SEQ ID NO: 225250 - DNA, 22 bp, Artificial Sequence
  Synthetic oligonucleotide; CTG chr2 60465143 60465164 60465148 60465143 -
tgagcactgtaatataatatgg

SEQ ID NO: 225251 - DNA, 22 bp, Artificial Sequence
  Synthetic oligonucleotide; CTG chr2 60465134 60465155 60465139 60465134 -
taatataatatggtacaccggc

SEQ ID NO: 225252 - DNA, 22 bp, Artificial Sequence
  Synthetic oligonucleotide; CTG chr2 60465104 60465125 60465109 60465104 -
agtgaaatacagattatatggt

SEQ ID NO: 225253 - DNA, 22 bp, Artificial Sequence
  Synthetic oligonucleotide; TTA chr2 60465088 60465109 60465093 60465088 -
tatggtgaaattgtaatgcatc

SEQ ID NO: 225254 - DNA, 22 bp, Artificial Sequence
  Synthetic oligonucleotide; TTG chr2 60465075 60465096 60465080 60465075 -
taatgcatcatttgctattagt

SEQ ID NO: 225255 - DNA, 22 bp, Artificial Sequence
  Synthetic oligonucleotide; TTT chr2 60465062 60465083 60465067 60465062 -
gctattagtggactggtaataa

SEQ ID NO: 225256 - DNA, 22 bp, Artificial Sequence
  Synthetic oligonucleotide; TTG chr2 60465061 60465082 60465066 60465061 -
ctattagtggactggtaataat

SEQ ID NO: 225257 - DNA, 22 bp, Artificial Sequence
  Synthetic oligonucleotide; CTA chr2 60465058 60465079 60465063 60465058 -
ttagtggactggtaataattac

SEQ ID NO: 225258 - DNA, 22 bp, Artificial Sequence
  Synthetic oligonucleotide; TTA chr2 60465055 60465076 60465060 60465055 -
gtggactggtaataattaccag

SEQ ID NO: 225259 - DNA, 22 bp, Artificial Sequence
  Synthetic oligonucleotide; CTG chr2 60465047 60465068 60465052 60465047 -
gtaataattaccagtttcaaag

SEQ ID NO: 225260 - DNA, 22 bp, Artificial Sequence
  Synthetic oligonucleotide; TTA chr2 60465037 60465058 60465042 60465037 -
ccagtttcaaagcagctctctc

SEQ ID NO: 225261 - DNA, 22 bp, Artificial Sequence
  Synthetic oligonucleotide; TTT chr2 60465030 60465051 60465035 60465030 -
caaagcagctctctccatgtaa

SEQ ID NO: 225262 - DNA, 22 bp, Artificial Sequence
  Synthetic oligonucleotide; TTC chr2 60465029 60465050 60465034 60465029 -
aaagcagctctctccatgtaat

SEQ ID NO: 225263 - DNA, 22 bp, Artificial Sequence
  Synthetic oligonucleotide; CTC chr2 60465019 60465040 60465024 60465019 -
tctccatgtaatctttagtctc

SEQ ID NO: 225264 - DNA, 22 bp, Artificial Sequence
  Synthetic oligonucleotide; CTC chr2 60465017 60465038 60465022 60465017 -
tccatgtaatctttagtctcaa

SEQ ID NO: 225265 - DNA, 22 bp, Artificial Sequence
  Synthetic oligonucleotide; CTC chr2 60465015 60465036 60465020 60465015 -
catgtaatctttagtctcaatc

SEQ ID NO: 225266 - DNA, 22 bp, Artificial Sequence
  Synthetic oligonucleotide; CTT chr2 60465004 60465025 60465009 60465004 -
tagtctcaatcgtaacagccct

SEQ ID NO: 225267 - DNA, 22 bp, Artificial Sequence
  Synthetic oligonucleotide; TTT chr2 60465003 60465024 60465008 60465003 -
agtctcaatcgtaacagccctt

SEQ ID NO: 225268 - DNA, 22 bp, Artificial Sequence
  Synthetic oligonucleotide; TTA chr2 60465002 60465023 60465007 60465002 -
gtctcaatcgtaacagcccttc

SEQ ID NO: 225269 - DNA, 22 bp, Artificial Sequence
  Synthetic oligonucleotide; CTC chr2 60464997 60465018 60465002 60464997 -
aatcgtaacagcccttctcatt

SEQ ID NO: 225270 - DNA, 22 bp, Artificial Sequence
  Synthetic oligonucleotide; CTT chr2 60464981 60465002 60464986 60464981 -
ctcattgacattatgattacac

SEQ ID NO: 225271 - DNA, 22 bp, Artificial Sequence
  Synthetic oligonucleotide; TTC chr2 60464980 60465001 60464985 60464980 -
tcattgacattatgattacact

SEQ ID NO: 225272 - DNA, 22 bp, Artificial Sequence
  Synthetic oligonucleotide; CTC chr2 60464978 60464999 60464983 60464978 -
attgacattatgattacactag

SEQ ID NO: 225273 - DNA, 22 bp, Artificial Sequence
  Synthetic oligonucleotide; TTG chr2 60464974 60464995 60464979 60464974 -
acattatgattacactagctgc

SEQ ID NO: 225274 - DNA, 22 bp, Artificial Sequence
  Synthetic oligonucleotide; TTA chr2 60464968 60464989 60464973 60464968 -
tgattacactagctgccctcat

SEQ ID NO: 225275 - DNA, 22 bp, Artificial Sequence
  Synthetic oligonucleotide; TTA chr2 60464962 60464983 60464967 60464962 -
cactagctgccctcatgatcta

SEQ ID NO: 225276 - DNA, 22 bp, Artificial Sequence
  Synthetic oligonucleotide; CTA chr2 60464957 60464978 60464962 60464957 -
gctgccctcatgatctagaata

SEQ ID NO: 225277 - DNA, 22 bp, Artificial Sequence
  Synthetic oligonucleotide; CTG chr2 60464953 60464974 60464958 60464953 -
ccctcatgatctagaatatcta

SEQ ID NO: 225278 - DNA, 22 bp, Artificial Sequence
  Synthetic oligonucleotide; CTC chr2 60464948 60464969 60464953 60464948 -
atgatctagaatatctagttga

SEQ ID NO: 225279 - DNA, 22 bp, Artificial Sequence
  Synthetic oligonucleotide; CTA chr2 60464940 60464961 60464945 60464940 -
gaatatctagttgatgggaata

SEQ ID NO: 225280 - DNA, 22 bp, Artificial Sequence
  Synthetic oligonucleotide; CTA chr2 60464931 60464952 60464936 60464931 -
gttgatgggaatactaaaatgc

SEQ ID NO: 225281 - DNA, 22 bp, Artificial Sequence
  Synthetic oligonucleotide; TTG chr2 60464927 60464948 60464932 60464927 -
atgggaatactaaaatgcgata

SEQ ID NO: 225282 - DNA, 22 bp, Artificial Sequence
  Synthetic oligonucleotide; CTA chr2 60464915 60464936 60464920 60464915 -
aaatgcgatagtgaaaactgta

SEQ ID NO: 225283 - DNA, 22 bp, Artificial Sequence
  Synthetic oligonucleotide; CTG chr2 60464895 60464916 60464900 60464895 -
tatgttgtatgctcattataag

SEQ ID NO: 225284 - DNA, 22 bp, Artificial Sequence
  Synthetic oligonucleotide; TTG chr2 60464888 60464909 60464893 60464888 -
tatgctcattataagataaaat

SEQ ID NO: 225285 - DNA, 22 bp, Artificial Sequence
  Synthetic oligonucleotide; CTC chr2 60464881 60464902 60464886 60464881 -
attataagataaaatgccattt

SEQ ID NO: 225286 - DNA, 22 bp, Artificial Sequence
  Synthetic oligonucleotide; TTA chr2 60464877 60464898 60464882 60464877 -
taagataaaatgccattttctc

SEQ ID NO: 225287 - DNA, 22 bp, Artificial Sequence
  Synthetic oligonucleotide; TTT chr2 60464859 60464880 60464864 60464859 -
tctctgacctgatgtatgagag

SEQ ID NO: 225288 - DNA, 22 bp, Artificial Sequence
  Synthetic oligonucleotide; TTT chr2 60464858 60464879 60464863 60464858 -
ctctgacctgatgtatgagaga

SEQ ID NO: 225289 - DNA, 22 bp, Artificial Sequence
  Synthetic oligonucleotide; TTC chr2 60464857 60464878 60464862 60464857 -
tctgacctgatgtatgagagag

SEQ ID NO: 225290 - DNA, 22 bp, Artificial Sequence
  Synthetic oligonucleotide; CTC chr2 60464855 60464876 60464860 60464855 -
tgacctgatgtatgagagagag

SEQ ID NO: 225291 - DNA, 22 bp, Artificial Sequence
  Synthetic oligonucleotide; CTG chr2 60464853 60464874 60464858 60464853 -
acctgatgtatgagagagaggg

SEQ ID NO: 225292 - DNA, 22 bp, Artificial Sequence
  Synthetic oligonucleotide; CTG chr2 60464848 60464869 60464853 60464848 -
atgtatgagagagaggggagga

SEQ ID NO: 225293 - DNA, 22 bp, Artificial Sequence
  Synthetic oligonucleotide; TTA chr2 60464810 60464831 60464815 60464810 -
acatactgtagcatgatcacat

SEQ ID NO: 225294 - DNA, 22 bp, Artificial Sequence
  Synthetic oligonucleotide; CTG chr2 60464802 60464823 60464807 60464802 -
tagcatgatcacataactggct

SEQ ID NO: 225295 - DNA, 22 bp, Artificial Sequence
  Synthetic oligonucleotide; CTG chr2 60464783 60464804 60464788 60464783 -
gctctgaaaaaaagtttaggat

SEQ ID NO: 225296 - DNA, 22 bp, Artificial Sequence
  Synthetic oligonucleotide; CTC chr2 60464779 60464800 60464784 60464779 -
tgaaaaaaagtttaggatgctc

SEQ ID NO: 225297 - DNA, 22 bp, Artificial Sequence
  Synthetic oligonucleotide; CTG chr2 60464777 60464798 60464782 60464777 -
aaaaaaagtttaggatgctcag

SEQ ID NO: 225298 - DNA, 22 bp, Artificial Sequence
  Synthetic oligonucleotide; TTT chr2 60464766 60464787 60464771 60464766 -
aggatgctcagggcagcaaaat

SEQ ID NO: 225299 - DNA, 22 bp, Artificial Sequence
  Synthetic oligonucleotide; TTA chr2 60464765 60464786 60464770 60464765 -
ggatgctcagggcagcaaaata

SEQ ID NO: 225300 - DNA, 22 bp, Artificial Sequence
  Synthetic oligonucleotide; CTC chr2 60464757 60464778 60464762 60464757 -
agggcagcaaaataaaatggac

SEQ ID NO: 225301 - DNA, 22 bp, Artificial Sequence
  Synthetic oligonucleotide; CTT chr2 60464733 60464754 60464738 60464733 -
ttctcatttaagcctttttgaa

SEQ ID NO: 225302 - DNA, 22 bp, Artificial Sequence
  Synthetic oligonucleotide; TTT chr2 60464732 60464753 60464737 60464732 -
tctcatttaagcctttttgaaa

SEQ ID NO: 225303 - DNA, 22 bp, Artificial Sequence
  Synthetic oligonucleotide; TTT chr2 60464731 60464752 60464736 60464731 -
ctcatttaagcctttttgaaag

SEQ ID NO: 225304 - DNA, 22 bp, Artificial Sequence
  Synthetic oligonucleotide; TTC chr2 60464730 60464751 60464735 60464730 -
tcatttaagcctttttgaaagg

SEQ ID NO: 225305 - DNA, 22 bp, Artificial Sequence
  Synthetic oligonucleotide; CTC chr2 60464728 60464749 60464733 60464728 -
atttaagcctttttgaaaggat

SEQ ID NO: 225306 - DNA, 22 bp, Artificial Sequence
  Synthetic oligonucleotide; TTT chr2 60464724 60464745 60464729 60464724 -
aagcctttttgaaaggatacaa

SEQ ID NO: 225307 - DNA, 22 bp, Artificial Sequence
  Synthetic oligonucleotide; TTA chr2 60464723 60464744 60464728 60464723 -
agcctttttgaaaggatacaaa

SEQ ID NO: 225308 - DNA, 22 bp, Artificial Sequence
  Synthetic oligonucleotide; CTT chr2 60464717 60464738 60464722 60464717 -
tttgaaaggatacaaatgagat

SEQ ID NO: 225309 - DNA, 22 bp, Artificial Sequence
  Synthetic oligonucleotide; TTT chr2 60464716 60464737 60464721 60464716 -
ttgaaaggatacaaatgagatc

SEQ ID NO: 225310 - DNA, 22 bp, Artificial Sequence
  Synthetic oligonucleotide; TTT chr2 60464715 60464736 60464720 60464715 -
tgaaaggatacaaatgagatcc

SEQ ID NO: 225311 - DNA, 22 bp, Artificial Sequence
  Synthetic oligonucleotide; TTT chr2 60464714 60464735 60464719 60464714 -
gaaaggatacaaatgagatcct

SEQ ID NO: 225312 - DNA, 22 bp, Artificial Sequence
  Synthetic oligonucleotide; TTG chr2 60464713 60464734 60464718 60464713 -
aaaggatacaaatgagatcctt

SEQ ID NO: 225313 - DNA, 22 bp, Artificial Sequence
  Synthetic oligonucleotide; CTT chr2 60464691 60464712 60464696 60464691 -
gatgtagtgctgtatgccacag

SEQ ID NO: 225314 - DNA, 22 bp, Artificial Sequence
  Synthetic oligonucleotide; TTG chr2 60464690 60464711 60464695 60464690 -
atgtagtgctgtatgccacaga

SEQ ID NO: 225315 - DNA, 22 bp, Artificial Sequence
  Synthetic oligonucleotide; CTG chr2 60464679 60464700 60464684 60464679 -
tatgccacagattttggcattt

SEQ ID NO: 225316 - DNA, 22 bp, Artificial Sequence
  Synthetic oligonucleotide; TTT chr2 60464665 60464686 60464670 60464665 -
tggcatttatcaatgactacaa

SEQ ID NO: 225317 - DNA, 22 bp, Artificial Sequence
  Synthetic oligonucleotide; TTT chr2 60464664 60464685 60464669 60464664 -
ggcatttatcaatgactacaat

SEQ ID NO: 225318 - DNA, 22 bp, Artificial Sequence
  Synthetic oligonucleotide; TTG chr2 60464663 60464684 60464668 60464663 -
gcatttatcaatgactacaatt

SEQ ID NO: 225319 - DNA, 22 bp, Artificial Sequence
  Synthetic oligonucleotide; TTT chr2 60464657 60464678 60464662 60464657 -
atcaatgactacaattcatggc

SEQ ID NO: 225320 - DNA, 22 bp, Artificial Sequence
  Synthetic oligonucleotide; TTA chr2 60464656 60464677 60464661 60464656 -
tcaatgactacaattcatggca

SEQ ID NO: 225321 - DNA, 22 bp, Artificial Sequence
  Synthetic oligonucleotide; CTA chr2 60464646 60464667 60464651 60464646 -
caattcatggcacatgtgaaac

SEQ ID NO: 225322 - DNA, 22 bp, Artificial Sequence
  Synthetic oligonucleotide; TTC chr2 60464640 60464661 60464645 60464640 -
atggcacatgtgaaaccagcac

SEQ ID NO: 225323 - DNA, 22 bp, Artificial Sequence
  Synthetic oligonucleotide; CTA chr2 60464613 60464634 60464618 60464613 -
attatgagtctagtcctggatt

SEQ ID NO: 225324 - DNA, 22 bp, Artificial Sequence
  Synthetic oligonucleotide; TTA chr2 60464609 60464630 60464614 60464609 -
tgagtctagtcctggatttcaa

SEQ ID NO: 225325 - DNA, 22 bp, Artificial Sequence
  Synthetic oligonucleotide; CTA chr2 60464601 60464622 60464606 60464601 -
gtcctggatttcaatcgatgtt

SEQ ID NO: 225326 - DNA, 22 bp, Artificial Sequence
  Synthetic oligonucleotide; CTG chr2 60464595 60464616 60464600 60464595 -
gatttcaatcgatgttttataa

SEQ ID NO: 225327 - DNA, 22 bp, Artificial Sequence
  Synthetic oligonucleotide; TTT chr2 60464590 60464611 60464595 60464590 -
caatcgatgttttataaggtaa

SEQ ID NO: 225328 - DNA, 22 bp, Artificial Sequence
  Synthetic oligonucleotide; TTC chr2 60464589 60464610 60464594 60464589 -
aatcgatgttttataaggtaaa

SEQ ID NO: 225329 - DNA, 22 bp, Artificial Sequence
  Synthetic oligonucleotide; TTT chr2 60464578 60464599 60464583 60464578 -
tataaggtaaaatataatttta

SEQ ID NO: 225330 - DNA, 22 bp, Artificial Sequence
  Synthetic oligonucleotide; TTT chr2 60464577 60464598 60464582 60464577 -
ataaggtaaaatataattttaa

SEQ ID NO: 225331 - DNA, 22 bp, Artificial Sequence
  Synthetic oligonucleotide; TTA chr2 60464576 60464597 60464581 60464576 -
taaggtaaaatataattttaag

SEQ ID NO: 225332 - DNA, 22 bp, Artificial Sequence
  Synthetic oligonucleotide; TTT chr2 60464558 60464579 60464563 60464558 -
taaggcatttggagtgatgaac

SEQ ID NO: 225333 - DNA, 22 bp, Artificial Sequence
  Synthetic oligonucleotide; TTT chr2 60464557 60464578 60464562 60464557 -
aaggcatttggagtgatgaacg

SEQ ID NO: 225334 - DNA, 22 bp, Artificial Sequence
  Synthetic oligonucleotide; TTA chr2 60464556 60464577 60464561 60464556 -
aggcatttggagtgatgaacgt

SEQ ID NO: 225335 - DNA, 22 bp, Artificial Sequence
  Synthetic oligonucleotide; TTT chr2 60464548 60464569 60464553 60464548 -
ggagtgatgaacgtgttaagga

SEQ ID NO: 225336 - DNA, 22 bp, Artificial Sequence
  Synthetic oligonucleotide; TTG chr2 60464547 60464568 60464552 60464547 -
gagtgatgaacgtgttaaggac

SEQ ID NO: 225337 - DNA, 22 bp, Artificial Sequence
  Synthetic oligonucleotide; TTA chr2 60464530 60464551 60464535 60464530 -
aggacttggattatcagacaaa

SEQ ID NO: 225338 - DNA, 22 bp, Artificial Sequence
  Synthetic oligonucleotide; CTT chr2 60464523 60464544 60464528 60464523 -
ggattatcagacaaatcttttt

SEQ ID NO: 225339 - DNA, 22 bp, Artificial Sequence
  Synthetic oligonucleotide; TTG chr2 60464522 60464543 60464527 60464522 -
gattatcagacaaatcttttta

SEQ ID NO: 225340 - DNA, 22 bp, Artificial Sequence
  Synthetic oligonucleotide; TTA chr2 60464517 60464538 60464522 60464517 -
tcagacaaatctttttacttgc

SEQ ID NO: 225341 - DNA, 22 bp, Artificial Sequence
  Synthetic oligonucleotide; CTT chr2 60464504 60464525 60464509 60464504 -
tttacttgcccaactcagatcg

SEQ ID NO: 225342 - DNA, 22 bp, Artificial Sequence
  Synthetic oligonucleotide; TTT chr2 60464503 60464524 60464508 60464503 -
ttacttgcccaactcagatcgt

SEQ ID NO: 225343 - DNA, 22 bp, Artificial Sequence
  Synthetic oligonucleotide; TTT chr2 60464502 60464523 60464507 60464502 -
tacttgcccaactcagatcgtc

SEQ ID NO: 225344 - DNA, 22 bp, Artificial Sequence
  Synthetic oligonucleotide; TTT chr2 60464501 60464522 60464506 60464501 -
acttgcccaactcagatcgtca

SEQ ID NO: 225345 - DNA, 22 bp, Artificial Sequence
  Synthetic oligonucleotide; TTA chr2 60464500 60464521 60464505 60464500 -
cttgcccaactcagatcgtcag

SEQ ID NO: 225346 - DNA, 22 bp, Artificial Sequence
  Synthetic oligonucleotide; CTT chr2 60464497 60464518 60464502 60464497 -
gcccaactcagatcgtcaggct

SEQ ID NO: 225347 - DNA, 22 bp, Artificial Sequence
  Synthetic oligonucleotide; TTG chr2 60464496 60464517 60464501 60464496 -
cccaactcagatcgtcaggcta

SEQ ID NO: 225348 - DNA, 22 bp, Artificial Sequence
  Synthetic oligonucleotide; CTC chr2 60464488 60464509 60464493 60464488 -
agatcgtcaggctaaataggaa

SEQ ID NO: 225349 - DNA, 22 bp, Artificial Sequence
  Synthetic oligonucleotide; CTA chr2 60464474 60464495 60464479 60464474 -
aataggaatgatagtcacccag

SEQ ID NO: 225350 - DNA, 22 bp, Artificial Sequence
  Synthetic oligonucleotide; CTA chr2 60464445 60464466 60464450 60464445 -
gggaggacaaggaggaagccac

SEQ ID NO: 225351 - DNA, 22 bp, Artificial Sequence
  Synthetic oligonucleotide; TTG chr2 60464406 60464427 60464411 60464406 -
gaaccagatagttttttttcca

SEQ ID NO: 225352 - DNA, 22 bp, Artificial Sequence
  Synthetic oligonucleotide; TTT chr2 60464392 60464413 60464397 60464392 -
tttttccagcctatttgggacc

SEQ ID NO: 225353 - DNA, 22 bp, Artificial Sequence
  Synthetic oligonucleotide; TTT chr2 60464391 60464412 60464396 60464391 -
ttttccagcctatttgggaccc

SEQ ID NO: 225354 - DNA, 22 bp, Artificial Sequence
  Synthetic oligonucleotide; TTT chr2 60464390 60464411 60464395 60464390 -
tttccagcctatttgggaccca

SEQ ID NO: 225355 - DNA, 22 bp, Artificial Sequence
  Synthetic oligonucleotide; TTT chr2 60464389 60464410 60464394 60464389 -
ttccagcctatttgggacccaa

SEQ ID NO: 225356 - DNA, 22 bp, Artificial Sequence
  Synthetic oligonucleotide; TTT chr2 60464388 60464409 60464393 60464388 -
tccagcctatttgggacccaag

SEQ ID NO: 225357 - DNA, 22 bp, Artificial Sequence
  Synthetic oligonucleotide; TTT chr2 60464387 60464408 60464392 60464387 -
ccagcctatttgggacccaagt

SEQ ID NO: 225358 - DNA, 22 bp, Artificial Sequence
  Synthetic oligonucleotide; TTC chr2 60464386 60464407 60464391 60464386 -
cagcctatttgggacccaagtt

SEQ ID NO: 225359 - DNA, 22 bp, Artificial Sequence
  Synthetic oligonucleotide; CTA chr2 60464379 60464400 60464384 60464379 -
tttgggacccaagttattgttc

SEQ ID NO: 225360 - DNA, 22 bp, Artificial Sequence
  Synthetic oligonucleotide; TTT chr2 60464376 60464397 60464381 60464376 -
gggacccaagttattgttcaac

SEQ ID NO: 225361 - DNA, 22 bp, Artificial Sequence
  Synthetic oligonucleotide; TTG chr2 60464375 60464396 60464380 60464375 -
ggacccaagttattgttcaaca

SEQ ID NO: 225362 - DNA, 22 bp, Artificial Sequence
  Synthetic oligonucleotide; TTA chr2 60464363 60464384 60464368 60464363 -
ttgttcaacaacaacaaaaaat

SEQ ID NO: 225363 - DNA, 22 bp, Artificial Sequence
  Synthetic oligonucleotide; TTG chr2 60464360 60464381 60464365 60464360 -
ttcaacaacaacaaaaaattta

SEQ ID NO: 225364 - DNA, 22 bp, Artificial Sequence
  Synthetic oligonucleotide; TTC chr2 60464357 60464378 60464362 60464357 -
aacaacaacaaaaaatttataa

SEQ ID NO: 225365 - DNA, 22 bp, Artificial Sequence
  Synthetic oligonucleotide; TTT chr2 60464339 60464360 60464344 60464339 -
ataaaaatgttctcaatgaagc

SEQ ID NO: 225366 - DNA, 22 bp, Artificial Sequence
  Synthetic oligonucleotide; TTA chr2 60464338 60464359 60464343 60464338 -
taaaaatgttctcaatgaagct

SEQ ID NO: 225367 - DNA, 22 bp, Artificial Sequence
  Synthetic oligonucleotide; TTC chr2 60464327 60464348 60464332 60464327 -
tcaatgaagctttttatttccc

SEQ ID NO: 225368 - DNA, 22 bp, Artificial Sequence
  Synthetic oligonucleotide; CTC chr2 60464325 60464346 60464330 60464325 -
aatgaagctttttatttccctt

SEQ ID NO: 225369 - DNA, 22 bp, Artificial Sequence
  Synthetic oligonucleotide; CTT chr2 60464315 60464336 60464320 60464315 -
tttatttccctttgaagagagg

SEQ ID NO: 225370 - DNA, 22 bp, Artificial Sequence
  Synthetic oligonucleotide; TTT chr2 60464314 60464335 60464319 60464314 -
ttatttccctttgaagagagga

SEQ ID NO: 225371 - DNA, 22 bp, Artificial Sequence
  Synthetic oligonucleotide; TTT chr2 60464313 60464334 60464318 60464313 -
tatttccctttgaagagaggag

SEQ ID NO: 225372 - DNA, 22 bp, Artificial Sequence
  Synthetic oligonucleotide; TTT chr2 60464312 60464333 60464317 60464312 -
atttccctttgaagagaggagg

SEQ ID NO: 225373 - DNA, 22 bp, Artificial Sequence
  Synthetic oligonucleotide; TTA chr2 60464311 60464332 60464316 60464311 -
tttccctttgaagagaggaggc

SEQ ID NO: 225374 - DNA, 22 bp, Artificial Sequence
  Synthetic oligonucleotide; TTT chr2 60464308 60464329 60464313 60464308 -
ccctttgaagagaggaggcaaa

SEQ ID NO: 225375 - DNA, 22 bp, Artificial Sequence
  Synthetic oligonucleotide; TTC chr2 60464307 60464328 60464312 60464307 -
cctttgaagagaggaggcaaac

SEQ ID NO: 225376 - DNA, 22 bp, Artificial Sequence
  Synthetic oligonucleotide; CTT chr2 60464303 60464324 60464308 60464303 -
tgaagagaggaggcaaacaaaa

SEQ ID NO: 225377 - DNA, 22 bp, Artificial Sequence
  Synthetic oligonucleotide; TTT chr2 60464302 60464323 60464307 60464302 -
gaagagaggaggcaaacaaaaa

SEQ ID NO: 225378 - DNA, 22 bp, Artificial Sequence
  Synthetic oligonucleotide; TTG chr2 60464301 60464322 60464306 60464301 -
aagagaggaggcaaacaaaaat

SEQ ID NO: 225379 - DNA, 22 bp, Artificial Sequence
  Synthetic oligonucleotide; CTA chr2 60464259 60464280 60464264 60464259 -
atgtcagcgttttctttcaaaa

SEQ ID NO: 225380 - DNA, 22 bp, Artificial Sequence
  Synthetic oligonucleotide; TTT chr2 60464247 60464268 60464252 60464247 -
tctttcaaaatctttctgcctt

SEQ ID NO: 225381 - DNA, 22 bp, Artificial Sequence
  Synthetic oligonucleotide; TTT chr2 60464246 60464267 60464251 60464246 -
ctttcaaaatctttctgccttt

SEQ ID NO: 225382 - DNA, 22 bp, Artificial Sequence
  Synthetic oligonucleotide; TTC chr2 60464245 60464266 60464250 60464245 -
tttcaaaatctttctgcctttt

SEQ ID NO: 225383 - DNA, 22 bp, Artificial Sequence
  Synthetic oligonucleotide; CTT chr2 60464243 60464264 60464248 60464243 -
tcaaaatctttctgcctttttt

SEQ ID NO: 225384 - DNA, 22 bp, Artificial Sequence
  Synthetic oligonucleotide; TTT chr2 60464242 60464263 60464247 60464242 -
caaaatctttctgccttttttc

SEQ ID NO: 225385 - DNA, 22 bp, Artificial Sequence
  Synthetic oligonucleotide; TTC chr2 60464241 60464262 60464246 60464241 -
aaaatctttctgccttttttcc

SEQ ID NO: 225386 - DNA, 22 bp, Artificial Sequence
  Synthetic oligonucleotide; CTT chr2 60464233 60464254 60464238 60464233 -
tctgccttttttcccccttcca

SEQ ID NO: 225387 - DNA, 22 bp, Artificial Sequence
  Synthetic oligonucleotide; TTT chr2 60464232 60464253 60464237 60464232 -
ctgccttttttcccccttccac

SEQ ID NO: 225388 - DNA, 22 bp, Artificial Sequence
  Synthetic oligonucleotide; TTC chr2 60464231 60464252 60464236 60464231 -
tgccttttttcccccttccaca

SEQ ID NO: 225389 - DNA, 22 bp, Artificial Sequence
  Synthetic oligonucleotide; CTG chr2 60464229 60464250 60464234 60464229 -
ccttttttcccccttccacatt

SEQ ID NO: 225390 - DNA, 22 bp, Artificial Sequence
  Synthetic oligonucleotide; CTT chr2 60464225 60464246 60464230 60464225 -
ttttcccccttccacattagac

SEQ ID NO: 225391 - DNA, 22 bp, Artificial Sequence
  Synthetic oligonucleotide; TTT chr2 60464224 60464245 60464229 60464224 -
tttcccccttccacattagaca

SEQ ID NO: 225392 - DNA, 22 bp, Artificial Sequence
  Synthetic oligonucleotide; TTT chr2 60464223 60464244 60464228 60464223 -
ttcccccttccacattagacaa

SEQ ID NO: 225393 - DNA, 22 bp, Artificial Sequence
  Synthetic oligonucleotide; TTT chr2 60464222 60464243 60464227 60464222 -
tcccccttccacattagacaaa

SEQ ID NO: 225394 - DNA, 22 bp, Artificial Sequence
  Synthetic oligonucleotide; TTT chr2 60464221 60464242 60464226 60464221 -
cccccttccacattagacaaat

SEQ ID NO: 225395 - DNA, 22 bp, Artificial Sequence
  Synthetic oligonucleotide; TTC chr2 60464220 60464241 60464225 60464220 -
ccccttccacattagacaaatg

SEQ ID NO: 225396 - DNA, 22 bp, Artificial Sequence
  Synthetic oligonucleotide; CTT chr2 60464214 60464235 60464219 60464214 -
ccacattagacaaatgtttgaa

SEQ ID NO: 225397 - DNA, 22 bp, Artificial Sequence
  Synthetic oligonucleotide; TTC chr2 60464213 60464234 60464218 60464213 -
cacattagacaaatgtttgaaa

SEQ ID NO: 225398 - DNA, 22 bp, Artificial Sequence
  Synthetic oligonucleotide; TTA chr2 60464206 60464227 60464211 60464206 -
gacaaatgtttgaaacctaatt

SEQ ID NO: 225399 - DNA, 22 bp, Artificial Sequence
  Synthetic oligonucleotide; TTT chr2 60464195 60464216 60464200 60464195 -
gaaacctaattttggtatctta

SEQ ID NO: 225400 - DNA, 22 bp, Artificial Sequence
  Synthetic oligonucleotide; TTG chr2 60464194 60464215 60464199 60464194 -
aaacctaattttggtatcttac

SEQ ID NO: 225401 - DNA, 22 bp, Artificial Sequence
  Synthetic oligonucleotide; CTA chr2 60464187 60464208 60464192 60464187 -
attttggtatcttaccatctaa

SEQ ID NO: 225402 - DNA, 22 bp, Artificial Sequence
  Synthetic oligonucleotide; TTT chr2 60464183 60464204 60464188 60464183 -
tggtatcttaccatctaatctt

SEQ ID NO: 225403 - DNA, 22 bp, Artificial Sequence
  Synthetic oligonucleotide; TTT chr2 60464182 60464203 60464187 60464182 -
ggtatcttaccatctaatcttg

SEQ ID NO: 225404 - DNA, 22 bp, Artificial Sequence
  Synthetic oligonucleotide; TTG chr2 60464181 60464202 60464186 60464181 -
gtatcttaccatctaatcttgt

SEQ ID NO: 225405 - DNA, 22 bp, Artificial Sequence
  Synthetic oligonucleotide; CTT chr2 60464174 60464195 60464179 60464174 -
accatctaatcttgtttaagag

SEQ ID NO: 225406 - DNA, 22 bp, Artificial Sequence
  Synthetic oligonucleotide; TTA chr2 60464173 60464194 60464178 60464173 -
ccatctaatcttgtttaagaga

SEQ ID NO: 225407 - DNA, 22 bp, Artificial Sequence
  Synthetic oligonucleotide; CTA chr2 60464166 60464187 60464171 60464166 -
atcttgtttaagagatttaccc

SEQ ID NO: 225408 - DNA, 22 bp, Artificial Sequence
  Synthetic oligonucleotide; CTT chr2 60464161 60464182 60464166 60464161 -
gtttaagagatttacccaggag

SEQ ID NO: 225409 - DNA, 22 bp, Artificial Sequence
  Synthetic oligonucleotide; TTG chr2 60464160 60464181 60464165 60464160 -
tttaagagatttacccaggagt

SEQ ID NO: 225410 - DNA, 22 bp, Artificial Sequence
  Synthetic oligonucleotide; TTT chr2 60464157 60464178 60464162 60464157 -
aagagatttacccaggagtgag

SEQ ID NO: 225411 - DNA, 22 bp, Artificial Sequence
  Synthetic oligonucleotide; TTA chr2 60464156 60464177 60464161 60464156 -
agagatttacccaggagtgaga

SEQ ID NO: 225412 - DNA, 22 bp, Artificial Sequence
  Synthetic oligonucleotide; TTT chr2 60464148 60464169 60464153 60464148 -
acccaggagtgagatatattga

SEQ ID NO: 225413 - DNA, 22 bp, Artificial Sequence
  Synthetic oligonucleotide; TTA chr2 60464147 60464168 60464152 60464147 -
cccaggagtgagatatattgag

SEQ ID NO: 225414 - DNA, 22 bp, Artificial Sequence
  Synthetic oligonucleotide; TTG chr2 60464127 60464148 60464132 60464127 -
agtgggattataaatgcgttgt

SEQ ID NO: 225415 - DNA, 22 bp, Artificial Sequence
  Synthetic oligonucleotide; TTA chr2 60464117 60464138 60464122 60464117 -
taaatgcgttgtaaagtaaatt

SEQ ID NO: 225416 - DNA, 22 bp, Artificial Sequence
  Synthetic oligonucleotide; TTG chr2 60464106 60464127 60464111 60464106 -
taaagtaaattacaaggtcagg

SEQ ID NO: 225417 - DNA, 22 bp, Artificial Sequence
  Synthetic oligonucleotide; TTA chr2 60464094 60464115 60464099 60464094 -
caaggtcagggcaggagtccat

SEQ ID NO: 225418 - DNA, 22 bp, Artificial Sequence
  Synthetic oligonucleotide; TTA chr2 60464070 60464091 60464075 60464070 -
tttagacaagtgcttgagcgag

SEQ ID NO: 225419 - DNA, 22 bp, Artificial Sequence
  Synthetic oligonucleotide; TTT chr2 60464067 60464088 60464072 60464067 -
agacaagtgcttgagcgaggct

SEQ ID NO: 225420 - DNA, 22 bp, Artificial Sequence
  Synthetic oligonucleotide; TTA chr2 60464066 60464087 60464071 60464066 -
gacaagtgcttgagcgaggctg

SEQ ID NO: 225421 - DNA, 22 bp, Artificial Sequence
  Synthetic oligonucleotide; CTT chr2 60464055 60464076 60464060 60464055 -
gagcgaggctggcttattttgg

SEQ ID NO: 225422 - DNA, 22 bp, Artificial Sequence
  Synthetic oligonucleotide; TTG chr2 60464054 60464075 60464059 60464054 -
agcgaggctggcttattttgga

SEQ ID NO: 225423 - DNA, 22 bp, Artificial Sequence
  Synthetic oligonucleotide; CTG chr2 60464044 60464065 60464049 60464044 -
gcttattttggaataccagtgt

SEQ ID NO: 225424 - DNA, 22 bp, Artificial Sequence
  Synthetic oligonucleotide; CTT chr2 60464040 60464061 60464045 60464040 -
attttggaataccagtgtttgg

SEQ ID NO: 225425 - DNA, 22 bp, Artificial Sequence
  Synthetic oligonucleotide; TTA chr2 60464039 60464060 60464044 60464039 -
ttttggaataccagtgtttggg

SEQ ID NO: 225426 - DNA, 22 bp, Artificial Sequence
  Synthetic oligonucleotide; TTT chr2 60464036 60464057 60464041 60464036 -
tggaataccagtgtttgggggc

SEQ ID NO: 225427 - DNA, 22 bp, Artificial Sequence
  Synthetic oligonucleotide; TTT chr2 60464035 60464056 60464040 60464035 -
ggaataccagtgtttgggggct

SEQ ID NO: 225428 - DNA, 22 bp, Artificial Sequence
  Synthetic oligonucleotide; TTG chr2 60464034 60464055 60464039 60464034 -
gaataccagtgtttgggggctc

SEQ ID NO: 225429 - DNA, 22 bp, Artificial Sequence
  Synthetic oligonucleotide; TTT chr2 60464020 60464041 60464025 60464020 -
gggggctcctgagaagaccctg

SEQ ID NO: 225430 - DNA, 22 bp, Artificial Sequence
  Synthetic oligonucleotide; TTG chr2 60464019 60464040 60464024 60464019 -
ggggctcctgagaagaccctgc

SEQ ID NO: 225431 - DNA, 22 bp, Artificial Sequence
  Synthetic oligonucleotide; CTC chr2 60464012 60464033 60464017 60464012 -
ctgagaagaccctgccggcttt

SEQ ID NO: 225432 - DNA, 22 bp, Artificial Sequence
  Synthetic oligonucleotide; CTG chr2 60464009 60464030 60464014 60464009 -
agaagaccctgccggcttttct

SEQ ID NO: 225433 - DNA, 22 bp, Artificial Sequence
  Synthetic oligonucleotide; CTG chr2 60463998 60464019 60464003 60463998 -
ccggcttttctttctgacttgc

SEQ ID NO: 225434 - DNA, 22 bp, Artificial Sequence
  Synthetic oligonucleotide; CTT chr2 60463991 60464012 60463996 60463991 -
ttctttctgacttgctaaatgg

SEQ ID NO: 225435 - DNA, 22 bp, Artificial Sequence
  Synthetic oligonucleotide; TTT chr2 60463990 60464011 60463995 60463990 -
tctttctgacttgctaaatgga

SEQ ID NO: 225436 - DNA, 22 bp, Artificial Sequence
  Synthetic oligonucleotide; TTT chr2 60463989 60464010 60463994 60463989 -
ctttctgacttgctaaatggag

SEQ ID NO: 225437 - DNA, 22 bp, Artificial Sequence
  Synthetic oligonucleotide; TTC chr2 60463988 60464009 60463993 60463988 -
tttctgacttgctaaatggagg

SEQ ID NO: 225438 - DNA, 22 bp, Artificial Sequence
  Synthetic oligonucleotide; CTT chr2 60463986 60464007 60463991 60463986 -
tctgacttgctaaatggaggca

SEQ ID NO: 225439 - DNA, 22 bp, Artificial Sequence
  Synthetic oligonucleotide; TTT chr2 60463985 60464006 60463990 60463985 -
ctgacttgctaaatggaggcat

SEQ ID NO: 225440 - DNA, 22 bp, Artificial Sequence
  Synthetic oligonucleotide; TTC chr2 60463984 60464005 60463989 60463984 -
tgacttgctaaatggaggcatc

SEQ ID NO: 225441 - DNA, 22 bp, Artificial Sequence
  Synthetic oligonucleotide; CTG chr2 60463982 60464003 60463987 60463982 -
acttgctaaatggaggcatcat

SEQ ID NO: 225442 - DNA, 22 bp, Artificial Sequence
  Synthetic oligonucleotide; CTT chr2 60463978 60463999 60463983 60463978 -
gctaaatggaggcatcatataa

SEQ ID NO: 225443 - DNA, 22 bp, Artificial Sequence
  Synthetic oligonucleotide; TTG chr2 60463977 60463998 60463982 60463977 -
ctaaatggaggcatcatataat

SEQ ID NO: 225444 - DNA, 22 bp, Artificial Sequence
  Synthetic oligonucleotide; CTA chr2 60463974 60463995 60463979 60463974 -
aatggaggcatcatataattga

SEQ ID NO: 225445 - DNA, 22 bp, Artificial Sequence
  Synthetic oligonucleotide; TTG chr2 60463953 60463974 60463958 60463953 -
attaattcctcattctcactct

SEQ ID NO: 225446 - DNA, 22 bp, Artificial Sequence
  Synthetic oligonucleotide; TTA chr2 60463949 60463970 60463954 60463949 -
attcctcattctcactcttaac

SEQ ID NO: 225447 - DNA, 22 bp, Artificial Sequence
  Synthetic oligonucleotide; TTC chr2 60463945 60463966 60463950 60463945 -
ctcattctcactcttaacctcc

SEQ ID NO: 225448 - DNA, 22 bp, Artificial Sequence
  Synthetic oligonucleotide; CTC chr2 60463942 60463963 60463947 60463942 -
attctcactcttaacctccctg

SEQ ID NO: 225449 - DNA, 22 bp, Artificial Sequence
  Synthetic oligonucleotide; TTC chr2 60463938 60463959 60463943 60463938 -
tcactcttaacctccctggtag

SEQ ID NO: 225450 - DNA, 22 bp, Artificial Sequence
  Synthetic oligonucleotide; CTC chr2 60463936 60463957 60463941 60463936 -
actcttaacctccctggtagat

SEQ ID NO: 225451 - DNA, 22 bp, Artificial Sequence
  Synthetic oligonucleotide; CTC chr2 60463932 60463953 60463937 60463932 -
ttaacctccctggtagattttt

SEQ ID NO: 225452 - DNA, 22 bp, Artificial Sequence
  Synthetic oligonucleotide; CTT chr2 60463930 60463951 60463935 60463930 -
aacctccctggtagattttttt

SEQ ID NO: 225453 - DNA, 22 bp, Artificial Sequence
  Synthetic oligonucleotide; TTA chr2 60463929 60463950 60463934 60463929 -
acctccctggtagatttttttt

SEQ ID NO: 225454 - DNA, 22 bp, Artificial Sequence
  Synthetic oligonucleotide; CTC chr2 60463924 60463945 60463929 60463924 -
cctggtagattttttttttttt

SEQ ID NO: 225455 - DNA, 22 bp, Artificial Sequence
  Synthetic oligonucleotide; CTG chr2 60463920 60463941 60463925 60463920 -
gtagattttttttttttttcct

SEQ ID NO: 225456 - DNA, 22 bp, Artificial Sequence
  Synthetic oligonucleotide; TTT chr2 60463912 60463933 60463917 60463912 -
tttttttttttccttcttagaa

SEQ ID NO: 225457 - DNA, 22 bp, Artificial Sequence
  Synthetic oligonucleotide; TTT chr2 60463911 60463932 60463916 60463911 -
ttttttttttccttcttagaaa

SEQ ID NO: 225458 - DNA, 22 bp, Artificial Sequence
  Synthetic oligonucleotide; TTT chr2 60463910 60463931 60463915 60463910 -
tttttttttccttcttagaaag

SEQ ID NO: 225459 - DNA, 22 bp, Artificial Sequence
  Synthetic oligonucleotide; TTT chr2 60463909 60463930 60463914 60463909 -
ttttttttccttcttagaaagt

SEQ ID NO: 225460 - DNA, 22 bp, Artificial Sequence
  Synthetic oligonucleotide; TTT chr2 60463908 60463929 60463913 60463908 -
tttttttccttcttagaaagtt

SEQ ID NO: 225461 - DNA, 22 bp, Artificial Sequence
  Synthetic oligonucleotide; TTT chr2 60463907 60463928 60463912 60463907 -
ttttttccttcttagaaagtta

SEQ ID NO: 225462 - DNA, 22 bp, Artificial Sequence
  Synthetic oligonucleotide; TTT chr2 60463906 60463927 60463911 60463906 -
tttttccttcttagaaagttac

SEQ ID NO: 225463 - DNA, 22 bp, Artificial Sequence
  Synthetic oligonucleotide; TTT chr2 60463905 60463926 60463910 60463905 -
ttttccttcttagaaagttact

SEQ ID NO: 225464 - DNA, 22 bp, Artificial Sequence
  Synthetic oligonucleotide; TTT chr2 60463904 60463925 60463909 60463904 -
tttccttcttagaaagttactg

SEQ ID NO: 225465 - DNA, 22 bp, Artificial Sequence
  Synthetic oligonucleotide; TTT chr2 60463903 60463924 60463908 60463903 -
ttccttcttagaaagttactga

SEQ ID NO: 225466 - DNA, 22 bp, Artificial Sequence
  Synthetic oligonucleotide; TTT chr2 60463902 60463923 60463907 60463902 -
tccttcttagaaagttactgac

SEQ ID NO: 225467 - DNA, 22 bp, Artificial Sequence
  Synthetic oligonucleotide; TTT chr2 60463901 60463922 60463906 60463901 -
ccttcttagaaagttactgaca

SEQ ID NO: 225468 - DNA, 22 bp, Artificial Sequence
  Synthetic oligonucleotide; TTC chr2 60463900 60463921 60463905 60463900 -
cttcttagaaagttactgacaa

SEQ ID NO: 225469 - DNA, 22 bp, Artificial Sequence
  Synthetic oligonucleotide; CTT chr2 60463897 60463918 60463902 60463897 -
cttagaaagttactgacaaata

SEQ ID NO: 225470 - DNA, 22 bp, Artificial Sequence
  Synthetic oligonucleotide; TTC chr2 60463896 60463917 60463901 60463896 -
ttagaaagttactgacaaatac

SEQ ID NO: 225471 - DNA, 22 bp, Artificial Sequence
  Synthetic oligonucleotide; CTT chr2 60463894 60463915 60463899 60463894 -
agaaagttactgacaaatacta

SEQ ID NO: 225472 - DNA, 22 bp, Artificial Sequence
  Synthetic oligonucleotide; TTA chr2 60463893 60463914 60463898 60463893 -
gaaagttactgacaaatactag

SEQ ID NO: 225473 - DNA, 22 bp, Artificial Sequence
  Synthetic oligonucleotide; TTA chr2 60463885 60463906 60463890 60463885 -
ctgacaaatactagctgtggcc

SEQ ID NO: 225474 - DNA, 22 bp, Artificial Sequence
  Synthetic oligonucleotide; CTG chr2 60463882 60463903 60463887 60463882 -
acaaatactagctgtggcctta

SEQ ID NO: 225475 - DNA, 22 bp, Artificial Sequence
  Synthetic oligonucleotide; CTA chr2 60463872 60463893 60463877 60463872 -
gctgtggccttaaagaactctt

SEQ ID NO: 225476 - DNA, 22 bp, Artificial Sequence
  Synthetic oligonucleotide; CTG chr2 60463868 60463889 60463873 60463868 -
tggccttaaagaactcttgcag

SEQ ID NO: 225477 - DNA, 22 bp, Artificial Sequence
  Synthetic oligonucleotide; CTT chr2 60463861 60463882 60463866 60463861 -
aaagaactcttgcagcccttct

SEQ ID NO: 225478 - DNA, 22 bp, Artificial Sequence
  Synthetic oligonucleotide; TTA chr2 60463860 60463881 60463865 60463860 -
aagaactcttgcagcccttctt

SEQ ID NO: 225479 - DNA, 22 bp, Artificial Sequence
  Synthetic oligonucleotide; CTC chr2 60463852 60463873 60463857 60463852 -
ttgcagcccttcttttaaaaga

SEQ ID NO: 225480 - DNA, 22 bp, Artificial Sequence
  Synthetic oligonucleotide; CTT chr2 60463850 60463871 60463855 60463850 -
gcagcccttcttttaaaagaag

SEQ ID NO: 225481 - DNA, 22 bp, Artificial Sequence
  Synthetic oligonucleotide; TTG chr2 60463849 60463870 60463854 60463849 -
cagcccttcttttaaaagaagg

SEQ ID NO: 225482 - DNA, 22 bp, Artificial Sequence
  Synthetic oligonucleotide; CTT chr2 60463841 60463862 60463846 60463841 -
cttttaaaagaaggagaaaagt

SEQ ID NO: 225483 - DNA, 22 bp, Artificial Sequence
  Synthetic oligonucleotide; TTC chr2 60463840 60463861 60463845 60463840 -
ttttaaaagaaggagaaaagtt

SEQ ID NO: 225484 - DNA, 22 bp, Artificial Sequence
  Synthetic oligonucleotide; CTT chr2 60463838 60463859 60463843 60463838 -
ttaaaagaaggagaaaagtttg

SEQ ID NO: 225485 - DNA, 22 bp, Artificial Sequence
  Synthetic oligonucleotide; TTT chr2 60463837 60463858 60463842 60463837 -
taaaagaaggagaaaagtttgt

SEQ ID NO: 225486 - DNA, 22 bp, Artificial Sequence
  Synthetic oligonucleotide; TTT chr2 60463836 60463857 60463841 60463836 -
aaaagaaggagaaaagtttgtt

SEQ ID NO: 225487 - DNA, 22 bp, Artificial Sequence
  Synthetic oligonucleotide; TTA chr2 60463835 60463856 60463840 60463835 -
aaagaaggagaaaagtttgtta

SEQ ID NO: 225488 - DNA, 22 bp, Artificial Sequence
  Synthetic oligonucleotide; TTT chr2 60463817 60463838 60463822 60463817 -
gttatttctcagttatatttta

SEQ ID NO: 225489 - DNA, 22 bp, Artificial Sequence
  Synthetic oligonucleotide; TTG chr2 60463816 60463837 60463821 60463816 -
ttatttctcagttatattttaa

SEQ ID NO: 225490 - DNA, 22 bp, Artificial Sequence
  Synthetic oligonucleotide; TTA chr2 60463813 60463834 60463818 60463813 -
tttctcagttatattttaaggc

SEQ ID NO: 225491 - DNA, 22 bp, Artificial Sequence
  Synthetic oligonucleotide; TTT chr2 60463810 60463831 60463815 60463810 -
ctcagttatattttaaggcttt

SEQ ID NO: 225492 - DNA, 22 bp, Artificial Sequence
  Synthetic oligonucleotide; TTC chr2 60463809 60463830 60463814 60463809 -
tcagttatattttaaggctttt

SEQ ID NO: 225493 - DNA, 22 bp, Artificial Sequence
  Synthetic oligonucleotide; CTC chr2 60463807 60463828 60463812 60463807 -
agttatattttaaggctttttt

SEQ ID NO: 225494 - DNA, 22 bp, Artificial Sequence
  Synthetic oligonucleotide; TTA chr2 60463802 60463823 60463807 60463802 -
tattttaaggctttttttttca

SEQ ID NO: 225495 - DNA, 22 bp, Artificial Sequence
  Synthetic oligonucleotide; TTT chr2 60463797 60463818 60463802 60463797 -
taaggctttttttttcagaatc

SEQ ID NO: 225496 - DNA, 22 bp, Artificial Sequence
  Synthetic oligonucleotide; TTT chr2 60463796 60463817 60463801 60463796 -
aaggctttttttttcagaatct

SEQ ID NO: 225497 - DNA, 22 bp, Artificial Sequence
  Synthetic oligonucleotide; TTA chr2 60463795 60463816 60463800 60463795 -
aggctttttttttcagaatctc

SEQ ID NO: 225498 - DNA, 22 bp, Artificial Sequence
  Synthetic oligonucleotide; CTT chr2 60463789 60463810 60463794 60463789 -
tttttttcagaatctctgggaa

SEQ ID NO: 225499 - DNA, 22 bp, Artificial Sequence
  Synthetic oligonucleotide; TTT chr2 60463788 60463809 60463793 60463788 -
ttttttcagaatctctgggaag

SEQ ID NO: 225500 - DNA, 22 bp, Artificial Sequence
  Synthetic oligonucleotide; TTT chr2 60463787 60463808 60463792 60463787 -
tttttcagaatctctgggaagt

SEQ ID NO: 225501 - DNA, 22 bp, Artificial Sequence
  Synthetic oligonucleotide; TTT chr2 60463786 60463807 60463791 60463786 -
ttttcagaatctctgggaagtt

SEQ ID NO: 225502 - DNA, 22 bp, Artificial Sequence
  Synthetic oligonucleotide; TTT chr2 60463785 60463806 60463790 60463785 -
tttcagaatctctgggaagttt

SEQ ID NO: 225503 - DNA, 22 bp, Artificial Sequence
  Synthetic oligonucleotide; TTT chr2 60463784 60463805 60463789 60463784 -
ttcagaatctctgggaagtttt

SEQ ID NO: 225504 - DNA, 22 bp, Artificial Sequence
  Synthetic oligonucleotide; TTT chr2 60463783 60463804 60463788 60463783 -
tcagaatctctgggaagttttg

SEQ ID NO: 225505 - DNA, 22 bp, Artificial Sequence
  Synthetic oligonucleotide; TTT chr2 60463782 60463803 60463787 60463782 -
cagaatctctgggaagttttgt

SEQ ID NO: 225506 - DNA, 22 bp, Artificial Sequence
  Synthetic oligonucleotide; TTC chr2 60463781 60463802 60463786 60463781 -
agaatctctgggaagttttgtt

SEQ ID NO: 225507 - DNA, 22 bp, Artificial Sequence
  Synthetic oligonucleotide; CTC chr2 60463773 60463794 60463778 60463773 -
tgggaagttttgtttttctcat

SEQ ID NO: 225508 - DNA, 22 bp, Artificial Sequence
  Synthetic oligonucleotide; CTG chr2 60463771 60463792 60463776 60463771 -
ggaagttttgtttttctcatcc

SEQ ID NO: 225509 - DNA, 22 bp, Artificial Sequence
  Synthetic oligonucleotide; TTT chr2 60463763 60463784 60463768 60463763 -
tgtttttctcatcctcgtcctt

SEQ ID NO: 225510 - DNA, 22 bp, Artificial Sequence
  Synthetic oligonucleotide; TTT chr2 60463762 60463783 60463767 60463762 -
gtttttctcatcctcgtccttt

SEQ ID NO: 225511 - DNA, 22 bp, Artificial Sequence
  Synthetic oligonucleotide; TTG chr2 60463761 60463782 60463766 60463761 -
tttttctcatcctcgtcctttg

SEQ ID NO: 225512 - DNA, 22 bp, Artificial Sequence
  Synthetic oligonucleotide; TTT chr2 60463758 60463779 60463763 60463758 -
ttctcatcctcgtcctttggct

SEQ ID NO: 225513 - DNA, 22 bp, Artificial Sequence
  Synthetic oligonucleotide; TTT chr2 60463757 60463778 60463762 60463757 -
tctcatcctcgtcctttggcta

SEQ ID NO: 225514 - DNA, 22 bp, Artificial Sequence
  Synthetic oligonucleotide; TTT chr2 60463756 60463777 60463761 60463756 -
ctcatcctcgtcctttggctac

SEQ ID NO: 225515 - DNA, 22 bp, Artificial Sequence
  Synthetic oligonucleotide; TTC chr2 60463755 60463776 60463760 60463755 -
tcatcctcgtcctttggctacc

SEQ ID NO: 225516 - DNA, 22 bp, Artificial Sequence
  Synthetic oligonucleotide; CTC chr2 60463753 60463774 60463758 60463753 -
atcctcgtcctttggctaccat

SEQ ID NO: 225517 - DNA, 22 bp, Artificial Sequence
  Synthetic oligonucleotide; CTC chr2 60463747 60463768 60463752 60463747 -
gtcctttggctaccattacttc

SEQ ID NO: 225518 - DNA, 22 bp, Artificial Sequence
  Synthetic oligonucleotide; CTT chr2 60463741 60463762 60463746 60463741 -
tggctaccattacttctgccct

SEQ ID NO: 225519 - DNA, 22 bp, Artificial Sequence
  Synthetic oligonucleotide; TTT chr2 60463740 60463761 60463745 60463740 -
ggctaccattacttctgccctt

SEQ ID NO: 225520 - DNA, 22 bp, Artificial Sequence
  Synthetic oligonucleotide; TTG chr2 60463739 60463760 60463744 60463739 -
gctaccattacttctgcccttt

SEQ ID NO: 225521 - DNA, 22 bp, Artificial Sequence
  Synthetic oligonucleotide; CTA chr2 60463735 60463756 60463740 60463735 -
ccattacttctgccctttttaa

SEQ ID NO: 225522 - DNA, 22 bp, Artificial Sequence
  Synthetic oligonucleotide; TTA chr2 60463729 60463750 60463734 60463729 -
cttctgccctttttaatgttgc

SEQ ID NO: 225523 - DNA, 22 bp, Artificial Sequence
  Synthetic oligonucleotide; CTT chr2 60463726 60463747 60463731 60463726 -
ctgccctttttaatgttgcagt

SEQ ID NO: 225524 - DNA, 22 bp, Artificial Sequence
  Synthetic oligonucleotide; TTC chr2 60463725 60463746 60463730 60463725 -
tgccctttttaatgttgcagtt

SEQ ID NO: 225525 - DNA, 22 bp, Artificial Sequence
  Synthetic oligonucleotide; CTG chr2 60463723 60463744 60463728 60463723 -
ccctttttaatgttgcagttga

SEQ ID NO: 225526 - DNA, 22 bp, Artificial Sequence
  Synthetic oligonucleotide; CTT chr2 60463718 60463739 60463723 60463718 -
tttaatgttgcagttgactagt

SEQ ID NO: 225527 - DNA, 22 bp, Artificial Sequence
  Synthetic oligonucleotide; TTT chr2 60463717 60463738 60463722 60463717 -
ttaatgttgcagttgactagta

SEQ ID NO: 225528 - DNA, 22 bp, Artificial Sequence
  Synthetic oligonucleotide; TTT chr2 60463716 60463737 60463721 60463716 -
taatgttgcagttgactagtaa

SEQ ID NO: 225529 - DNA, 22 bp, Artificial Sequence
  Synthetic oligonucleotide; TTT chr2 60463715 60463736 60463720 60463715 -
aatgttgcagttgactagtaaa

SEQ ID NO: 225530 - DNA, 22 bp, Artificial Sequence
  Synthetic oligonucleotide; TTA chr2 60463714 60463735 60463719 60463714 -
atgttgcagttgactagtaaac

SEQ ID NO: 225531 - DNA, 22 bp, Artificial Sequence
  Synthetic oligonucleotide; TTG chr2 60463708 60463729 60463713 60463708 -
cagttgactagtaaactgttgg

SEQ ID NO: 225532 - DNA, 22 bp, Artificial Sequence
  Synthetic oligonucleotide; TTG chr2 60463702 60463723 60463707 60463702 -
actagtaaactgttggtcagtt

SEQ ID NO: 225533 - DNA, 22 bp, Artificial Sequence
  Synthetic oligonucleotide; CTA chr2 60463698 60463719 60463703 60463698 -
gtaaactgttggtcagttattc

SEQ ID NO: 225534 - DNA, 22 bp, Artificial Sequence
  Synthetic oligonucleotide; CTG chr2 60463690 60463711 60463695 60463690 -
ttggtcagttattccatatata

SEQ ID NO: 225535 - DNA, 22 bp, Artificial Sequence
  Synthetic oligonucleotide; TTG chr2 60463687 60463708 60463692 60463687 -
gtcagttattccatatatatat

SEQ ID NO: 225536 - DNA, 22 bp, Artificial Sequence
  Synthetic oligonucleotide; TTA chr2 60463679 60463700 60463684 60463679 -
ttccatatatatatatatttaa

SEQ ID NO: 225537 - DNA, 22 bp, Artificial Sequence
  Synthetic oligonucleotide; TTC chr2 60463676 60463697 60463681 60463676 -
catatatatatatatttaatgt

SEQ ID NO: 225538 - DNA, 22 bp, Artificial Sequence
  Synthetic oligonucleotide; TTT chr2 60463659 60463680 60463664 60463659 -
aatgtagctatctccccatata

SEQ ID NO: 225539 - DNA, 22 bp, Artificial Sequence
  Synthetic oligonucleotide; TTA chr2 60463658 60463679 60463663 60463658 -
atgtagctatctccccatatat

SEQ ID NO: 225540 - DNA, 22 bp, Artificial Sequence
  Synthetic oligonucleotide; CTA chr2 60463649 60463670 60463654 60463649 -
tctccccatatatatttaattt

SEQ ID NO: 225541 - DNA, 22 bp, Artificial Sequence
  Synthetic oligonucleotide; CTC chr2 60463645 60463666 60463650 60463645 -
cccatatatatttaatttagcc

SEQ ID NO: 225542 - DNA, 22 bp, Artificial Sequence
  Synthetic oligonucleotide; TTT chr2 60463632 60463653 60463637 60463632 -
aatttagccatctccccaaatg

SEQ ID NO: 225543 - DNA, 22 bp, Artificial Sequence
  Synthetic oligonucleotide; TTA chr2 60463631 60463652 60463636 60463631 -
atttagccatctccccaaatga

SEQ ID NO: 225544 - DNA, 22 bp, Artificial Sequence
  Synthetic oligonucleotide; TTT chr2 60463627 60463648 60463632 60463627 -
agccatctccccaaatgaaata

SEQ ID NO: 225545 - DNA, 22 bp, Artificial Sequence
  Synthetic oligonucleotide; TTA chr2 60463626 60463647 60463631 60463626 -
gccatctccccaaatgaaatat

SEQ ID NO: 225546 - DNA, 22 bp, Artificial Sequence
  Synthetic oligonucleotide; CTC chr2 60463618 60463639 60463623 60463618 -
cccaaatgaaatattttgtgaa

SEQ ID NO: 225547 - DNA, 22 bp, Artificial Sequence
  Synthetic oligonucleotide; TTT chr2 60463602 60463623 60463607 60463602 -
tgtgaagtcaagctggcccttc

SEQ ID NO: 225548 - DNA, 22 bp, Artificial Sequence
  Synthetic oligonucleotide; TTT chr2 60463601 60463622 60463606 60463601 -
gtgaagtcaagctggcccttct

SEQ ID NO: 225549 - DNA, 22 bp, Artificial Sequence
  Synthetic oligonucleotide; TTG chr2 60463600 60463621 60463605 60463600 -
tgaagtcaagctggcccttctt

SEQ ID NO: 225550 - DNA, 22 bp, Artificial Sequence
  Synthetic oligonucleotide; CTG chr2 60463587 60463608 60463592 60463587 -
gcccttctttgccaaagtggca

SEQ ID NO: 225551 - DNA, 22 bp, Artificial Sequence
  Synthetic oligonucleotide; CTT chr2 60463581 60463602 60463586 60463581 -
ctttgccaaagtggcatttacc

SEQ ID NO: 225552 - DNA, 22 bp, Artificial Sequence
  Synthetic oligonucleotide; TTC chr2 60463580 60463601 60463585 60463580 -
tttgccaaagtggcatttacca

SEQ ID NO: 225553 - DNA, 22 bp, Artificial Sequence
  Synthetic oligonucleotide; CTT chr2 60463578 60463599 60463583 60463578 -
tgccaaagtggcatttaccact

SEQ ID NO: 225554 - DNA, 22 bp, Artificial Sequence
  Synthetic oligonucleotide; TTT chr2 60463577 60463598 60463582 60463577 -
gccaaagtggcatttaccactc

SEQ ID NO: 225555 - DNA, 22 bp, Artificial Sequence
  Synthetic oligonucleotide; TTG chr2 60463576 60463597 60463581 60463576 -
ccaaagtggcatttaccactct

SEQ ID NO: 225556 - DNA, 22 bp, Artificial Sequence
  Synthetic oligonucleotide; TTT chr2 60463562 60463583 60463567 60463562 -
accactcttgggttcttttcag

SEQ ID NO: 225557 - DNA, 22 bp, Artificial Sequence
  Synthetic oligonucleotide; TTA chr2 60463561 60463582 60463566 60463561 -
ccactcttgggttcttttcagc

SEQ ID NO: 225558 - DNA, 22 bp, Artificial Sequence
  Synthetic oligonucleotide; CTC chr2 60463555 60463576 60463560 60463555 -
ttgggttcttttcagcaaggga

SEQ ID NO: 225559 - DNA, 22 bp, Artificial Sequence
  Synthetic oligonucleotide; CTT chr2 60463553 60463574 60463558 60463553 -
gggttcttttcagcaagggaaa

SEQ ID NO: 225560 - DNA, 22 bp, Artificial Sequence
  Synthetic oligonucleotide; TTG chr2 60463552 60463573 60463557 60463552 -
ggttcttttcagcaagggaaat

SEQ ID NO: 225561 - DNA, 22 bp, Artificial Sequence
  Synthetic oligonucleotide; TTC chr2 60463547 60463568 60463552 60463547 -
ttttcagcaagggaaataatgt

SEQ ID NO: 225562 - DNA, 22 bp, Artificial Sequence
  Synthetic oligonucleotide; CTT chr2 60463545 60463566 60463550 60463545 -
ttcagcaagggaaataatgtga

SEQ ID NO: 225563 - DNA, 22 bp, Artificial Sequence
  Synthetic oligonucleotide; TTT chr2 60463544 60463565 60463549 60463544 -
tcagcaagggaaataatgtgac

SEQ ID NO: 225564 - DNA, 22 bp, Artificial Sequence
  Synthetic oligonucleotide; TTT chr2 60463543 60463564 60463548 60463543 -
cagcaagggaaataatgtgact

SEQ ID NO: 225565 - DNA, 22 bp, Artificial Sequence
  Synthetic oligonucleotide; TTC chr2 60463542 60463563 60463547 60463542 -
agcaagggaaataatgtgactt

SEQ ID NO: 225566 - DNA, 22 bp, Artificial Sequence
  Synthetic oligonucleotide; CTT chr2 60463520 60463541 60463525 60463520 -
aagcagggcccctctccagacg

SEQ ID NO: 225567 - DNA, 22 bp, Artificial Sequence
  Synthetic oligonucleotide; TTA chr2 60463519 60463540 60463524 60463519 -
agcagggcccctctccagacgg

SEQ ID NO: 225568 - DNA, 22 bp, Artificial Sequence
  Synthetic oligonucleotide; CTC chr2 60463506 60463527 60463511 60463506 -
tccagacggcttggctactggc

SEQ ID NO: 225569 - DNA, 22 bp, Artificial Sequence
  Synthetic oligonucleotide; CTC chr2 60463504 60463525 60463509 60463504 -
cagacggcttggctactggcca

SEQ ID NO: 225570 - DNA, 22 bp, Artificial Sequence
  Synthetic oligonucleotide; CTT chr2 60463494 60463515 60463499 60463494 -
ggctactggccagagttgacta

SEQ ID NO: 225571 - DNA, 22 bp, Artificial Sequence
  Synthetic oligonucleotide; TTG chr2 60463493 60463514 60463498 60463493 -
gctactggccagagttgactag

SEQ ID NO: 225572 - DNA, 22 bp, Artificial Sequence
  Synthetic oligonucleotide; CTA chr2 60463489 60463510 60463494 60463489 -
ctggccagagttgactagctga

SEQ ID NO: 225573 - DNA, 22 bp, Artificial Sequence
  Synthetic oligonucleotide; CTG chr2 60463486 60463507 60463491 60463486 -
gccagagttgactagctgaact

SEQ ID NO: 225574 - DNA, 22 bp, Artificial Sequence
  Synthetic oligonucleotide; TTG chr2 60463476 60463497 60463481 60463476 -
actagctgaactgtatctttct

SEQ ID NO: 225575 - DNA, 22 bp, Artificial Sequence
  Synthetic oligonucleotide; CTA chr2 60463472 60463493 60463477 60463472 -
gctgaactgtatctttctgttt

SEQ ID NO: 225576 - DNA, 22 bp, Artificial Sequence
  Synthetic oligonucleotide; CTG chr2 60463468 60463489 60463473 60463468 -
aactgtatctttctgtttcttt

SEQ ID NO: 225577 - DNA, 22 bp, Artificial Sequence
  Synthetic oligonucleotide; CTG chr2 60463463 60463484 60463468 60463463 -
tatctttctgtttctttctcaa

SEQ ID NO: 225578 - DNA, 22 bp, Artificial Sequence
  Synthetic oligonucleotide; CTT chr2 60463457 60463478 60463462 60463457 -
tctgtttctttctcaactggag

SEQ ID NO: 225579 - DNA, 22 bp, Artificial Sequence
  Synthetic oligonucleotide; TTT chr2 60463456 60463477 60463461 60463456 -
ctgtttctttctcaactggagc

SEQ ID NO: 225580 - DNA, 22 bp, Artificial Sequence
  Synthetic oligonucleotide; TTC chr2 60463455 60463476 60463460 60463455 -
tgtttctttctcaactggagct

SEQ ID NO: 225581 - DNA, 22 bp, Artificial Sequence
  Synthetic oligonucleotide; CTG chr2 60463453 60463474 60463458 60463453 -
tttctttctcaactggagctga

SEQ ID NO: 225582 - DNA, 22 bp, Artificial Sequence
  Synthetic oligonucleotide; TTT chr2 60463450 60463471 60463455 60463450 -
ctttctcaactggagctgagtc

SEQ ID NO: 225583 - DNA, 22 bp, Artificial Sequence
  Synthetic oligonucleotide; TTC chr2 60463449 60463470 60463454 60463449 -
tttctcaactggagctgagtcc

SEQ ID NO: 225584 - DNA, 22 bp, Artificial Sequence
  Synthetic oligonucleotide; CTT chr2 60463447 60463468 60463452 60463447 -
tctcaactggagctgagtccca

SEQ ID NO: 225585 - DNA, 22 bp, Artificial Sequence
  Synthetic oligonucleotide; TTT chr2 60463446 60463467 60463451 60463446 -
ctcaactggagctgagtcccag

SEQ ID NO: 225586 - DNA, 22 bp, Artificial Sequence
  Synthetic oligonucleotide; TTC chr2 60463445 60463466 60463450 60463445 -
tcaactggagctgagtcccagc

SEQ ID NO: 225587 - DNA, 22 bp, Artificial Sequence
  Synthetic oligonucleotide; CTC chr2 60463443 60463464 60463448 60463443 -
aactggagctgagtcccagccg

SEQ ID NO: 225588 - DNA, 22 bp, Artificial Sequence
  Synthetic oligonucleotide; CTG chr2 60463438 60463459 60463443 60463438 -
gagctgagtcccagccgagggc

SEQ ID NO: 225589 - DNA, 22 bp, Artificial Sequence
  Synthetic oligonucleotide; CTG chr2 60463432 60463453 60463437 60463432 -
agtcccagccgagggcgcagga

SEQ ID NO: 225590 - DNA, 22 bp, Artificial Sequence
  Synthetic oligonucleotide; TTG chr2 60463405 60463426 60463410 60463405 -
tataatttggttcacgttgtta

SEQ ID NO: 225591 - DNA, 22 bp, Artificial Sequence
  Synthetic oligonucleotide; TTT chr2 60463397 60463418 60463402 60463397 -
ggttcacgttgttagcctctca

SEQ ID NO: 225592 - DNA, 22 bp, Artificial Sequence
  Synthetic oligonucleotide; TTG chr2 60463396 60463417 60463401 60463396 -
gttcacgttgttagcctctcaa

SEQ ID NO: 225593 - DNA, 22 bp, Artificial Sequence
  Synthetic oligonucleotide; TTC chr2 60463392 60463413 60463397 60463392 -
acgttgttagcctctcaaaaca

SEQ ID NO: 225594 - DNA, 22 bp, Artificial Sequence
  Synthetic oligonucleotide; TTG chr2 60463386 60463407 60463391 60463386 -
ttagcctctcaaaacaatgagg

SEQ ID NO: 225595 - DNA, 22 bp, Artificial Sequence
  Synthetic oligonucleotide; TTA chr2 60463383 60463404 60463388 60463383 -
gcctctcaaaacaatgaggagg

SEQ ID NO: 225596 - DNA, 22 bp, Artificial Sequence
  Synthetic oligonucleotide; CTC chr2 60463378 60463399 60463383 60463378 -
tcaaaacaatgaggaggaggat

SEQ ID NO: 225597 - DNA, 22 bp, Artificial Sequence
  Synthetic oligonucleotide; CTC chr2 60463376 60463397 60463381 60463376 -
aaaacaatgaggaggaggatag

SEQ ID NO: 225598 - DNA, 22 bp, Artificial Sequence
  Synthetic oligonucleotide; TTT chr2 60463344 60463365 60463349 60463344 -
ctcagcctgctgcctgtcatgg

SEQ ID NO: 225599 - DNA, 22 bp, Artificial Sequence
  Synthetic oligonucleotide; TTC chr2 60463343 60463364 60463348 60463343 -
tcagcctgctgcctgtcatggc

SEQ ID NO: 225600 - DNA, 22 bp, Artificial Sequence
  Synthetic oligonucleotide; CTC chr2 60463341 60463362 60463346 60463341 -
agcctgctgcctgtcatggcgc

SEQ ID NO: 225601 - DNA, 22 bp, Artificial Sequence
  Synthetic oligonucleotide; CTG chr2 60463335 60463356 60463340 60463335 -
ctgcctgtcatggcgctggctg

SEQ ID NO: 225602 - DNA, 22 bp, Artificial Sequence
  Synthetic oligonucleotide; CTG chr2 60463332 60463353 60463337 60463332 -
cctgtcatggcgctggctgttt

SEQ ID NO: 225603 - DNA, 22 bp, Artificial Sequence
  Synthetic oligonucleotide; CTG chr2 60463328 60463349 60463333 60463328 -
tcatggcgctggctgttttaac

SEQ ID NO: 225604 - DNA, 22 bp, Artificial Sequence
  Synthetic oligonucleotide; CTG chr2 60463317 60463338 60463322 60463317 -
gctgttttaactgttccttaaa

SEQ ID NO: 225605 - DNA, 22 bp, Artificial Sequence
  Synthetic oligonucleotide; CTG chr2 60463313 60463334 60463318 60463313 -
ttttaactgttccttaaactag

SEQ ID NO: 225606 - DNA, 22 bp, Artificial Sequence
  Synthetic oligonucleotide; TTT chr2 60463310 60463331 60463315 60463310 -
taactgttccttaaactaggat

SEQ ID NO: 225607 - DNA, 22 bp, Artificial Sequence
  Synthetic oligonucleotide; TTT chr2 60463309 60463330 60463314 60463309 -
aactgttccttaaactaggatg

SEQ ID NO: 225608 - DNA, 22 bp, Artificial Sequence
  Synthetic oligonucleotide; TTA chr2 60463308 60463329 60463313 60463308 -
actgttccttaaactaggatgc

SEQ ID NO: 225609 - DNA, 22 bp, Artificial Sequence
  Synthetic oligonucleotide; CTG chr2 60463304 60463325 60463309 60463304 -
ttccttaaactaggatgctgtg

SEQ ID NO: 225610 - DNA, 22 bp, Artificial Sequence
  Synthetic oligonucleotide; TTC chr2 60463301 60463322 60463306 60463301 -
cttaaactaggatgctgtgtct

SEQ ID NO: 225611 - DNA, 22 bp, Artificial Sequence
  Synthetic oligonucleotide; CTT chr2 60463298 60463319 60463303 60463298 -
aaactaggatgctgtgtctgct

SEQ ID NO: 225612 - DNA, 22 bp, Artificial Sequence
  Synthetic oligonucleotide; TTA chr2 60463297 60463318 60463302 60463297 -
aactaggatgctgtgtctgctt

SEQ ID NO: 225613 - DNA, 22 bp, Artificial Sequence
  Synthetic oligonucleotide; CTA chr2 60463292 60463313 60463297 60463292 -
ggatgctgtgtctgcttaagtc

SEQ ID NO: 225614 - DNA, 22 bp, Artificial Sequence
  Synthetic oligonucleotide; CTG chr2 60463284 60463305 60463289 60463284 -
tgtctgcttaagtcggcaccag

SEQ ID NO: 225615 - DNA, 22 bp, Artificial Sequence
  Synthetic oligonucleotide; CTG chr2 60463278 60463299 60463283 60463278 -
cttaagtcggcaccagccactc

SEQ ID NO: 225616 - DNA, 22 bp, Artificial Sequence
  Synthetic oligonucleotide; CTT chr2 60463275 60463296 60463280 60463275 -
aagtcggcaccagccactcctc

SEQ ID NO: 225617 - DNA, 22 bp, Artificial Sequence
  Synthetic oligonucleotide; TTA chr2 60463274 60463295 60463279 60463274 -
agtcggcaccagccactcctcc

SEQ ID NO: 225618 - DNA, 22 bp, Artificial Sequence
  Synthetic oligonucleotide; CTC chr2 60463256 60463277 60463261 60463256 -
ctcctaacttttccagacttgc

SEQ ID NO: 225619 - DNA, 22 bp, Artificial Sequence
  Synthetic oligonucleotide; CTC chr2 60463253 60463274 60463258 60463253 -
ctaacttttccagacttgcatt

SEQ ID NO: 225620 - DNA, 22 bp, Artificial Sequence
  Synthetic oligonucleotide; CTA chr2 60463250 60463271 60463255 60463250 -
acttttccagacttgcatttgt

SEQ ID NO: 225621 - DNA, 22 bp, Artificial Sequence
  Synthetic oligonucleotide; CTT chr2 60463246 60463267 60463251 60463246 -
ttccagacttgcatttgtctga

SEQ ID NO: 225622 - DNA, 22 bp, Artificial Sequence
  Synthetic oligonucleotide; TTT chr2 60463245 60463266 60463250 60463245 -
tccagacttgcatttgtctgac

SEQ ID NO: 225623 - DNA, 22 bp, Artificial Sequence
  Synthetic oligonucleotide; TTT chr2 60463244 60463265 60463249 60463244 -
ccagacttgcatttgtctgacc

SEQ ID NO: 225624 - DNA, 22 bp, Artificial Sequence
  Synthetic oligonucleotide; TTC chr2 60463243 60463264 60463248 60463243 -
cagacttgcatttgtctgaccg

SEQ ID NO: 225625 - DNA, 22 bp, Artificial Sequence
  Synthetic oligonucleotide; CTT chr2 60463236 60463257 60463241 60463236 -
gcatttgtctgaccgggggaca

SEQ ID NO: 225626 - DNA, 22 bp, Artificial Sequence
  Synthetic oligonucleotide; TTG chr2 60463235 60463256 60463240 60463235 -
catttgtctgaccgggggacaa

SEQ ID NO: 225627 - DNA, 22 bp, Artificial Sequence
  Synthetic oligonucleotide; TTT chr2 60463230 60463251 60463235 60463230 -
gtctgaccgggggacaactcct

SEQ ID NO: 225628 - DNA, 22 bp, Artificial Sequence
  Synthetic oligonucleotide; TTG chr2 60463229 60463250 60463234 60463229 -
tctgaccgggggacaactccta

SEQ ID NO: 225629 - DNA, 22 bp, Artificial Sequence
  Synthetic oligonucleotide; CTG chr2 60463225 60463246 60463230 60463225 -
accgggggacaactcctaaaga

SEQ ID NO: 225630 - DNA, 22 bp, Artificial Sequence
  Synthetic oligonucleotide; CTC chr2 60463210 60463231 60463215 60463210 -
ctaaagattggatacagcctat

SEQ ID NO: 225631 - DNA, 22 bp, Artificial Sequence
  Synthetic oligonucleotide; CTA chr2 60463207 60463228 60463212 60463207 -
aagattggatacagcctatccg

SEQ ID NO: 225632 - DNA, 22 bp, Artificial Sequence
  Synthetic oligonucleotide; TTG chr2 60463200 60463221 60463205 60463200 -
gatacagcctatccgttaaatc

SEQ ID NO: 225633 - DNA, 22 bp, Artificial Sequence
  Synthetic oligonucleotide; CTA chr2 60463189 60463210 60463194 60463189 -
tccgttaaatctgaatgaagtt

SEQ ID NO: 225634 - DNA, 22 bp, Artificial Sequence
  Synthetic oligonucleotide; TTA chr2 60463182 60463203 60463187 60463182 -
aatctgaatgaagtttttcttt

SEQ ID NO: 225635 - DNA, 22 bp, Artificial Sequence
  Synthetic oligonucleotide; CTG chr2 60463176 60463197 60463181 60463176 -
aatgaagtttttctttcagatt

SEQ ID NO: 225636 - DNA, 22 bp, Artificial Sequence
  Synthetic oligonucleotide; TTT chr2 60463166 60463187 60463171 60463166 -
ttctttcagattttttaaacat

SEQ ID NO: 225637 - DNA, 22 bp, Artificial Sequence
  Synthetic oligonucleotide; TTT chr2 60463165 60463186 60463170 60463165 -
tctttcagattttttaaacatt

SEQ ID NO: 225638 - DNA, 22 bp, Artificial Sequence
  Synthetic oligonucleotide; TTT chr2 60463164 60463185 60463169 60463164 -
ctttcagattttttaaacattc

SEQ ID NO: 225639 - DNA, 22 bp, Artificial Sequence
  Synthetic oligonucleotide; TTC chr2 60463163 60463184 60463168 60463163 -
tttcagattttttaaacattct

SEQ ID NO: 225640 - DNA, 22 bp, Artificial Sequence
  Synthetic oligonucleotide; CTT chr2 60463161 60463182 60463166 60463161 -
tcagattttttaaacattcttt

SEQ ID NO: 225641 - DNA, 22 bp, Artificial Sequence
  Synthetic oligonucleotide; TTT chr2 60463160 60463181 60463165 60463160 -
cagattttttaaacattctttg

SEQ ID NO: 225642 - DNA, 22 bp, Artificial Sequence
  Synthetic oligonucleotide; TTC chr2 60463159 60463180 60463164 60463159 -
agattttttaaacattctttga

SEQ ID NO: 225643 - DNA, 22 bp, Artificial Sequence
  Synthetic oligonucleotide; TTT chr2 60463153 60463174 60463158 60463153 -
tttaaacattctttgagataaa

SEQ ID NO: 225644 - DNA, 22 bp, Artificial Sequence
  Synthetic oligonucleotide; TTT chr2 60463152 60463173 60463157 60463152 -
ttaaacattctttgagataaaa

SEQ ID NO: 225645 - DNA, 22 bp, Artificial Sequence
  Synthetic oligonucleotide; TTT chr2 60463151 60463172 60463156 60463151 -
taaacattctttgagataaaaa

SEQ ID NO: 225646 - DNA, 22 bp, Artificial Sequence
  Synthetic oligonucleotide; TTT chr2 60463150 60463171 60463155 60463150 -
aaacattctttgagataaaaat

SEQ ID NO: 225647 - DNA, 22 bp, Artificial Sequence
  Synthetic oligonucleotide; TTA chr2 60463149 60463170 60463154 60463149 -
aacattctttgagataaaaatg

SEQ ID NO: 225648 - DNA, 22 bp, Artificial Sequence
  Synthetic oligonucleotide; TTC chr2 60463142 60463163 60463147 60463142 -
tttgagataaaaatggacgtcc

SEQ ID NO: 225649 - DNA, 22 bp, Artificial Sequence
  Synthetic oligonucleotide; CTT chr2 60463140 60463161 60463145 60463140 -
tgagataaaaatggacgtcccc

SEQ ID NO: 225650 - DNA, 22 bp, Artificial Sequence
  Synthetic oligonucleotide; TTT chr2 60463139 60463160 60463144 60463139 -
gagataaaaatggacgtcccca

SEQ ID NO: 225651 - DNA, 22 bp, Artificial Sequence
  Synthetic oligonucleotide; TTG chr2 60463138 60463159 60463143 60463138 -
agataaaaatggacgtccccat

SEQ ID NO: 225652 - DNA, 22 bp, Artificial Sequence
  Synthetic oligonucleotide; TTG chr2 60463107 60463128 60463112 60463107 -
tggaaccaaaattgggactcac

SEQ ID NO: 225653 - DNA, 22 bp, Artificial Sequence
  Synthetic oligonucleotide; TTG chr2 60463093 60463114 60463098 60463093 -
ggactcactgatcctcccacag

SEQ ID NO: 225654 - DNA, 22 bp, Artificial Sequence
  Synthetic oligonucleotide; CTC chr2 60463087 60463108 60463092 60463087 -
actgatcctcccacagtctggg

SEQ ID NO: 225655 - DNA, 22 bp, Artificial Sequence
  Synthetic oligonucleotide; CTG chr2 60463083 60463104 60463088 60463083 -
atcctcccacagtctggggtgt

SEQ ID NO: 225656 - DNA, 22 bp, Artificial Sequence
  Synthetic oligonucleotide; CTC chr2 60463077 60463098 60463082 60463077 -
ccacagtctggggtgtgagaat

SEQ ID NO: 225657 - DNA, 22 bp, Artificial Sequence
  Synthetic oligonucleotide; CTG chr2 60463067 60463088 60463072 60463067 -
gggtgtgagaatgttgctagtc

SEQ ID NO: 225658 - DNA, 22 bp, Artificial Sequence
  Synthetic oligonucleotide; TTG chr2 60463051 60463072 60463056 60463051 -
ctagtcttttttccacggaagt

SEQ ID NO: 225659 - DNA, 22 bp, Artificial Sequence
  Synthetic oligonucleotide; CTA chr2 60463048 60463069 60463053 60463048 -
gtcttttttccacggaagtatt

SEQ ID NO: 225660 - DNA, 22 bp, Artificial Sequence
  Synthetic oligonucleotide; CTT chr2 60463043 60463064 60463048 60463043 -
ttttccacggaagtattttatg

SEQ ID NO: 225661 - DNA, 22 bp, Artificial Sequence
  Synthetic oligonucleotide; TTT chr2 60463042 60463063 60463047 60463042 -
tttccacggaagtattttatga

SEQ ID NO: 225662 - DNA, 22 bp, Artificial Sequence
  Synthetic oligonucleotide; TTT chr2 60463041 60463062 60463046 60463041 -
ttccacggaagtattttatgag

SEQ ID NO: 225663 - DNA, 22 bp, Artificial Sequence
  Synthetic oligonucleotide; TTT chr2 60463040 60463061 60463045 60463040 -
tccacggaagtattttatgagt

SEQ ID NO: 225664 - DNA, 22 bp, Artificial Sequence
  Synthetic oligonucleotide; TTT chr2 60463039 60463060 60463044 60463039 -
ccacggaagtattttatgagta

SEQ ID NO: 225665 - DNA, 22 bp, Artificial Sequence
  Synthetic oligonucleotide; TTC chr2 60463038 60463059 60463043 60463038 -
cacggaagtattttatgagtac

SEQ ID NO: 225666 - DNA, 22 bp, Artificial Sequence
  Synthetic oligonucleotide; TTT chr2 60463025 60463046 60463030 60463025 -
tatgagtaccctctcattttaa

SEQ ID NO: 225667 - DNA, 22 bp, Artificial Sequence
  Synthetic oligonucleotide; TTT chr2 60463024 60463045 60463029 60463024 -
atgagtaccctctcattttaac

SEQ ID NO: 225668 - DNA, 22 bp, Artificial Sequence
  Synthetic oligonucleotide; TTA chr2 60463023 60463044 60463028 60463023 -
tgagtaccctctcattttaaca

SEQ ID NO: 225669 - DNA, 22 bp, Artificial Sequence
  Synthetic oligonucleotide; CTC chr2 60463012 60463033 60463017 60463012 -
tcattttaacaatatcaacaat

SEQ ID NO: 225670 - DNA, 22 bp, Artificial Sequence
  Synthetic oligonucleotide; CTC chr2 60463010 60463031 60463015 60463010 -
attttaacaatatcaacaatta

SEQ ID NO: 225671 - DNA, 22 bp, Artificial Sequence
  Synthetic oligonucleotide; TTT chr2 60463006 60463027 60463011 60463006 -
taacaatatcaacaattagtgt

SEQ ID NO: 225672 - DNA, 22 bp, Artificial Sequence
  Synthetic oligonucleotide; TTT chr2 60463005 60463026 60463010 60463005 -
aacaatatcaacaattagtgtg

SEQ ID NO: 225673 - DNA, 22 bp, Artificial Sequence
  Synthetic oligonucleotide; TTA chr2 60463004 60463025 60463009 60463004 -
acaatatcaacaattagtgtgt

SEQ ID NO: 225674 - DNA, 22 bp, Artificial Sequence
  Synthetic oligonucleotide; TTA chr2 60462988 60463009 60462993 60462988 -
gtgtgtttcaggctaatgctga

SEQ ID NO: 225675 - DNA, 22 bp, Artificial Sequence
  Synthetic oligonucleotide; TTT chr2 60462980 60463001 60462985 60462980 -
caggctaatgctgaaagcatct

SEQ ID NO: 225676 - DNA, 22 bp, Artificial Sequence
  Synthetic oligonucleotide; TTC chr2 60462979 60463000 60462984 60462979 -
aggctaatgctgaaagcatctt

SEQ ID NO: 225677 - DNA, 22 bp, Artificial Sequence
  Synthetic oligonucleotide; CTA chr2 60462973 60462994 60462978 60462973 -
atgctgaaagcatctttagggc

SEQ ID NO: 225678 - DNA, 22 bp, Artificial Sequence
  Synthetic oligonucleotide; CTG chr2 60462967 60462988 60462972 60462967 -
aaagcatctttagggccataga

SEQ ID NO: 225679 - DNA, 22 bp, Artificial Sequence
  Synthetic oligonucleotide; CTT chr2 60462957 60462978 60462962 60462957 -
tagggccatagaacattgtagt

SEQ ID NO: 225680 - DNA, 22 bp, Artificial Sequence
  Synthetic oligonucleotide; TTT chr2 60462956 60462977 60462961 60462956 -
agggccatagaacattgtagtg

SEQ ID NO: 225681 - DNA, 22 bp, Artificial Sequence
  Synthetic oligonucleotide; TTA chr2 60462955 60462976 60462960 60462955 -
gggccatagaacattgtagtga

SEQ ID NO: 225682 - DNA, 22 bp, Artificial Sequence
  Synthetic oligonucleotide; TTG chr2 60462939 60462960 60462944 60462939 -
tagtgagttgaccttcttcccc

SEQ ID NO: 225683 - DNA, 22 bp, Artificial Sequence
  Synthetic oligonucleotide; TTG chr2 60462929 60462950 60462934 60462929 -
accttcttccccttttttgata

SEQ ID NO: 225684 - DNA, 22 bp, Artificial Sequence
  Synthetic oligonucleotide; CTT chr2 60462924 60462945 60462929 60462924 -
cttccccttttttgatacctct

SEQ ID NO: 225685 - DNA, 22 bp, Artificial Sequence
  Synthetic oligonucleotide; TTC chr2 60462923 60462944 60462928 60462923 -
ttccccttttttgatacctcta

SEQ ID NO: 225686 - DNA, 22 bp, Artificial Sequence
  Synthetic oligonucleotide; CTT chr2 60462921 60462942 60462926 60462921 -
ccccttttttgatacctctatg

SEQ ID NO: 225687 - DNA, 22 bp, Artificial Sequence
  Synthetic oligonucleotide; TTC chr2 60462920 60462941 60462925 60462920 -
cccttttttgatacctctatga

SEQ ID NO: 225688 - DNA, 22 bp, Artificial Sequence
  Synthetic oligonucleotide; CTT chr2 60462915 60462936 60462920 60462915 -
ttttgatacctctatgaaatgt

SEQ ID NO: 225689 - DNA, 22 bp, Artificial Sequence
  Synthetic oligonucleotide; TTT chr2 60462914 60462935 60462919 60462914 -
tttgatacctctatgaaatgtt

SEQ ID NO: 225690 - DNA, 22 bp, Artificial Sequence
  Synthetic oligonucleotide; TTT chr2 60462913 60462934 60462918 60462913 -
ttgatacctctatgaaatgttt

SEQ ID NO: 225691 - DNA, 22 bp, Artificial Sequence
  Synthetic oligonucleotide; TTT chr2 60462912 60462933 60462917 60462912 -
tgatacctctatgaaatgtttg

SEQ ID NO: 225692 - DNA, 22 bp, Artificial Sequence
  Synthetic oligonucleotide; TTT chr2 60462911 60462932 60462916 60462911 -
gatacctctatgaaatgtttgc

SEQ ID NO: 225693 - DNA, 22 bp, Artificial Sequence
  Synthetic oligonucleotide; TTG chr2 60462910 60462931 60462915 60462910 -
atacctctatgaaatgtttgcc

SEQ ID NO: 225694 - DNA, 22 bp, Artificial Sequence
  Synthetic oligonucleotide; CTC chr2 60462903 60462924 60462908 60462903 -
tatgaaatgtttgcctatttag

SEQ ID NO: 225695 - DNA, 22 bp, Artificial Sequence
  Synthetic oligonucleotide; CTA chr2 60462901 60462922 60462906 60462901 -
tgaaatgtttgcctatttagaa

SEQ ID NO: 225696 - DNA, 22 bp, Artificial Sequence
  Synthetic oligonucleotide; TTT chr2 60462891 60462912 60462896 60462891 -
gcctatttagaaagttcacctg

SEQ ID NO: 225697 - DNA, 22 bp, Artificial Sequence
  Synthetic oligonucleotide; TTG chr2 60462890 60462911 60462895 60462890 -
cctatttagaaagttcacctgt

SEQ ID NO: 225698 - DNA, 22 bp, Artificial Sequence
  Synthetic oligonucleotide; CTA chr2 60462886 60462907 60462891 60462886 -
tttagaaagttcacctgtcacc

SEQ ID NO: 225699 - DNA, 22 bp, Artificial Sequence
  Synthetic oligonucleotide; TTT chr2 60462883 60462904 60462888 60462883 -
agaaagttcacctgtcacccag

SEQ ID NO: 225700 - DNA, 22 bp, Artificial Sequence
  Synthetic oligonucleotide; TTA chr2 60462882 60462903 60462887 60462882 -
gaaagttcacctgtcacccagg

SEQ ID NO: 225701 - DNA, 22 bp, Artificial Sequence
  Synthetic oligonucleotide; TTC chr2 60462874 60462895 60462879 60462874 -
acctgtcacccaggggggaata

SEQ ID NO: 225702 - DNA, 22 bp, Artificial Sequence
  Synthetic oligonucleotide; CTG chr2 60462869 60462890 60462874 60462869 -
tcacccaggggggaatagaaag

SEQ ID NO: 225703 - DNA, 22 bp, Artificial Sequence
  Synthetic oligonucleotide; CTG chr2 60462844 60462865 60462849 60462844 -
ggatttaggaagccaaaaagtt

SEQ ID NO: 225704 - DNA, 22 bp, Artificial Sequence
  Synthetic oligonucleotide; TTT chr2 60462838 60462859 60462843 60462838 -
aggaagccaaaaagtttccttg

SEQ ID NO: 225705 - DNA, 22 bp, Artificial Sequence
  Synthetic oligonucleotide; TTA chr2 60462837 60462858 60462842 60462837 -
ggaagccaaaaagtttccttgg

SEQ ID NO: 225706 - DNA, 22 bp, Artificial Sequence
  Synthetic oligonucleotide; TTT chr2 60462821 60462842 60462826 60462821 -
ccttgggtcaccttgtccaagt

SEQ ID NO: 225707 - DNA, 22 bp, Artificial Sequence
  Synthetic oligonucleotide; TTC chr2 60462820 60462841 60462825 60462820 -
cttgggtcaccttgtccaagtt

SEQ ID NO: 225708 - DNA, 22 bp, Artificial Sequence
  Synthetic oligonucleotide; CTT chr2 60462817 60462838 60462822 60462817 -
gggtcaccttgtccaagtttct

SEQ ID NO: 225709 - DNA, 22 bp, Artificial Sequence
  Synthetic oligonucleotide; TTG chr2 60462816 60462837 60462821 60462816 -
ggtcaccttgtccaagtttctc

SEQ ID NO: 225710 - DNA, 22 bp, Artificial Sequence
  Synthetic oligonucleotide; CTT chr2 60462807 60462828 60462812 60462807 -
gtccaagtttctcacttaacaa

SEQ ID NO: 225711 - DNA, 22 bp, Artificial Sequence
  Synthetic oligonucleotide; TTG chr2 60462806 60462827 60462811 60462806 -
tccaagtttctcacttaacaag

SEQ ID NO: 225712 - DNA, 22 bp, Artificial Sequence
  Synthetic oligonucleotide; TTT chr2 60462797 60462818 60462802 60462797 -
ctcacttaacaaggaggaaaca

SEQ ID NO: 225713 - DNA, 22 bp, Artificial Sequence
  Synthetic oligonucleotide; TTC chr2 60462796 60462817 60462801 60462796 -
tcacttaacaaggaggaaacag

SEQ ID NO: 225714 - DNA, 22 bp, Artificial Sequence
  Synthetic oligonucleotide; CTC chr2 60462794 60462815 60462799 60462794 -
acttaacaaggaggaaacagag

SEQ ID NO: 225715 - DNA, 22 bp, Artificial Sequence
  Synthetic oligonucleotide; CTT chr2 60462790 60462811 60462795 60462790 -
aacaaggaggaaacagaggcac

SEQ ID NO: 225716 - DNA, 22 bp, Artificial Sequence
  Synthetic oligonucleotide; TTA chr2 60462789 60462810 60462794 60462789 -
acaaggaggaaacagaggcaca

SEQ ID NO: 225717 - DNA, 22 bp, Artificial Sequence
  Synthetic oligonucleotide; CTT chr2 60462750 60462771 60462755 60462750 -
gccccaaactacagctgatgga

SEQ ID NO: 225718 - DNA, 22 bp, Artificial Sequence
  Synthetic oligonucleotide; TTG chr2 60462749 60462770 60462754 60462749 -
ccccaaactacagctgatggaa

SEQ ID NO: 225719 - DNA, 22 bp, Artificial Sequence
  Synthetic oligonucleotide; CTA chr2 60462739 60462760 60462744 60462739 -
cagctgatggaactggaaagtt

SEQ ID NO: 225720 - DNA, 22 bp, Artificial Sequence
  Synthetic oligonucleotide; CTG chr2 60462733 60462754 60462738 60462733 -
atggaactggaaagtttagaag

SEQ ID NO: 225721 - DNA, 22 bp, Artificial Sequence
  Synthetic oligonucleotide; CTG chr2 60462724 60462745 60462729 60462724 -
gaaagtttagaagacatttgtt

SEQ ID NO: 225722 - DNA, 22 bp, Artificial Sequence
  Synthetic oligonucleotide; TTT chr2 60462716 60462737 60462721 60462716 -
agaagacatttgttgaggtgcc

SEQ ID NO: 225723 - DNA, 22 bp, Artificial Sequence
  Synthetic oligonucleotide; TTA chr2 60462715 60462736 60462720 60462715 -
gaagacatttgttgaggtgcct

SEQ ID NO: 225724 - DNA, 22 bp, Artificial Sequence
  Synthetic oligonucleotide; TTT chr2 60462705 60462726 60462710 60462705 -
gttgaggtgcctagaatgtagg

SEQ ID NO: 225725 - DNA, 22 bp, Artificial Sequence
  Synthetic oligonucleotide; TTG chr2 60462704 60462725 60462709 60462704 -
ttgaggtgcctagaatgtaggg

SEQ ID NO: 225726 - DNA, 22 bp, Artificial Sequence
  Synthetic oligonucleotide; TTG chr2 60462701 60462722 60462706 60462701 -
aggtgcctagaatgtagggacc

SEQ ID NO: 225727 - DNA, 22 bp, Artificial Sequence
  Synthetic oligonucleotide; CTA chr2 60462692 60462713 60462697 60462692 -
gaatgtagggaccttcatcctc

SEQ ID NO: 225728 - DNA, 22 bp, Artificial Sequence
  Synthetic oligonucleotide; CTT chr2 60462677 60462698 60462682 60462677 -
catcctcaagccagaactggtc

SEQ ID NO: 225729 - DNA, 22 bp, Artificial Sequence
  Synthetic oligonucleotide; TTC chr2 60462676 60462697 60462681 60462676 -
atcctcaagccagaactggtca

SEQ ID NO: 225730 - DNA, 22 bp, Artificial Sequence
  Synthetic oligonucleotide; CTC chr2 60462670 60462691 60462675 60462670 -
aagccagaactggtcaggattt

SEQ ID NO: 225731 - DNA, 22 bp, Artificial Sequence
  Synthetic oligonucleotide; CTG chr2 60462658 60462679 60462663 60462658 -
gtcaggatttttctgctttggg

SEQ ID NO: 225732 - DNA, 22 bp, Artificial Sequence
  Synthetic oligonucleotide; TTT chr2 60462648 60462669 60462653 60462648 -
ttctgctttggggattggatat

SEQ ID NO: 225733 - DNA, 22 bp, Artificial Sequence
  Synthetic oligonucleotide; TTT chr2 60462647 60462668 60462652 60462647 -
tctgctttggggattggatata

SEQ ID NO: 225734 - DNA, 22 bp, Artificial Sequence
  Synthetic oligonucleotide; TTT chr2 60462646 60462667 60462651 60462646 -
ctgctttggggattggatataa

SEQ ID NO: 225735 - DNA, 22 bp, Artificial Sequence
  Synthetic oligonucleotide; TTC chr2 60462645 60462666 60462650 60462645 -
tgctttggggattggatataaa

SEQ ID NO: 225736 - DNA, 22 bp, Artificial Sequence
  Synthetic oligonucleotide; CTG chr2 60462643 60462664 60462648 60462643 -
ctttggggattggatataaaat

SEQ ID NO: 225737 - DNA, 22 bp, Artificial Sequence
  Synthetic oligonucleotide; CTT chr2 60462640 60462661 60462645 60462640 -
tggggattggatataaaatttc

SEQ ID NO: 225738 - DNA, 22 bp, Artificial Sequence
  Synthetic oligonucleotide; TTT chr2 60462639 60462660 60462644 60462639 -
ggggattggatataaaatttct

SEQ ID NO: 225739 - DNA, 22 bp, Artificial Sequence
  Synthetic oligonucleotide; TTG chr2 60462638 60462659 60462643 60462638 -
gggattggatataaaatttcta

SEQ ID NO: 225740 - DNA, 22 bp, Artificial Sequence
  Synthetic oligonucleotide; TTG chr2 60462631 60462652 60462636 60462631 -
gatataaaatttctagaactga

SEQ ID NO: 225741 - DNA, 22 bp, Artificial Sequence
  Synthetic oligonucleotide; TTT chr2 60462619 60462640 60462624 60462619 -
ctagaactgagtttaatggcag

SEQ ID NO: 225742 - DNA, 22 bp, Artificial Sequence
  Synthetic oligonucleotide; TTC chr2 60462618 60462639 60462623 60462618 -
tagaactgagtttaatggcagg

SEQ ID NO: 225743 - DNA, 22 bp, Artificial Sequence
  Synthetic oligonucleotide; CTA chr2 60462616 60462637 60462621 60462616 -
gaactgagtttaatggcaggaa

SEQ ID NO: 225744 - DNA, 22 bp, Artificial Sequence
  Synthetic oligonucleotide; CTG chr2 60462610 60462631 60462615 60462610 -
agtttaatggcaggaagatcaa

SEQ ID NO: 225745 - DNA, 22 bp, Artificial Sequence
  Synthetic oligonucleotide; TTT chr2 60462605 60462626 60462610 60462605 -
aatggcaggaagatcaattgga

SEQ ID NO: 225746 - DNA, 22 bp, Artificial Sequence
  Synthetic oligonucleotide; TTA chr2 60462604 60462625 60462609 60462604 -
atggcaggaagatcaattggac

SEQ ID NO: 225747 - DNA, 22 bp, Artificial Sequence
  Synthetic oligonucleotide; TTG chr2 60462585 60462606 60462590 60462585 -
gaccaatatttactgggtaccc

SEQ ID NO: 225748 - DNA, 22 bp, Artificial Sequence
  Synthetic oligonucleotide; TTT chr2 60462574 60462595 60462579 60462574 -
actgggtacccatgctcagacg

SEQ ID NO: 225749 - DNA, 22 bp, Artificial Sequence
  Synthetic oligonucleotide; TTA chr2 60462573 60462594 60462578 60462573 -
ctgggtacccatgctcagacgt

SEQ ID NO: 225750 - DNA, 22 bp, Artificial Sequence
  Synthetic oligonucleotide; CTG chr2 60462570 60462591 60462575 60462570 -
ggtacccatgctcagacgtgcc

SEQ ID NO: 225751 - DNA, 22 bp, Artificial Sequence
  Synthetic oligonucleotide; CTC chr2 60462557 60462578 60462562 60462557 -
agacgtgccaggcacagggggt

SEQ ID NO: 225752 - DNA, 22 bp, Artificial Sequence
  Synthetic oligonucleotide; CTT chr2 60462519 60462540 60462524 60462519 -
aggccttggggttgaggggtgg

SEQ ID NO: 225753 - DNA, 22 bp, Artificial Sequence
  Synthetic oligonucleotide; TTA chr2 60462518 60462539 60462523 60462518 -
ggccttggggttgaggggtggg

SEQ ID NO: 225754 - DNA, 22 bp, Artificial Sequence
  Synthetic oligonucleotide; CTT chr2 60462512 60462533 60462517 60462512 -
ggggttgaggggtgggggcagg

SEQ ID NO: 225755 - DNA, 22 bp, Artificial Sequence
  Synthetic oligonucleotide; TTG chr2 60462511 60462532 60462516 60462511 -
gggttgaggggtgggggcaggg

SEQ ID NO: 225756 - DNA, 22 bp, Artificial Sequence
  Synthetic oligonucleotide; TTG chr2 60462505 60462526 60462510 60462505 -
aggggtgggggcagggaaggct

SEQ ID NO: 225757 - DNA, 22 bp, Artificial Sequence
  Synthetic oligonucleotide; CTG chr2 60462482 60462503 60462487 60462482 -
gaggtggaacataaataagcaa

SEQ ID NO: 225758 - DNA, 22 bp, Artificial Sequence
  Synthetic oligonucleotide; TTG chr2 60462457 60462478 60462462 60462457 -
ctgatgcccgcctcagtgatta

SEQ ID NO: 225759 - DNA, 22 bp, Artificial Sequence
  Synthetic oligonucleotide; CTG chr2 60462454 60462475 60462459 60462454 -
atgcccgcctcagtgattaaac

SEQ ID NO: 225760 - DNA, 22 bp, Artificial Sequence
  Synthetic oligonucleotide; CTC chr2 60462443 60462464 60462448 60462443 -
agtgattaaacattgatgttgg

SEQ ID NO: 225761 - DNA, 22 bp, Artificial Sequence
  Synthetic oligonucleotide; TTA chr2 60462435 60462456 60462440 60462435 -
aacattgatgttggtgttgtat

SEQ ID NO: 225762 - DNA, 22 bp, Artificial Sequence
  Synthetic oligonucleotide; TTG chr2 60462428 60462449 60462433 60462428 -
atgttggtgttgtattattttg

SEQ ID NO: 225763 - DNA, 22 bp, Artificial Sequence
  Synthetic oligonucleotide; TTG chr2 60462422 60462443 60462427 60462422 -
gtgttgtattattttgcaggta

SEQ ID NO: 225764 - DNA, 22 bp, Artificial Sequence
  Synthetic oligonucleotide; TTG chr2 60462416 60462437 60462421 60462416 -
tattattttgcaggtaaagatg

SEQ ID NO: 225765 - DNA, 22 bp, Artificial Sequence
  Synthetic oligonucleotide; TTA chr2 60462411 60462432 60462416 60462411 -
ttttgcaggtaaagatgagccc

SEQ ID NO: 225766 - DNA, 22 bp, Artificial Sequence
  Synthetic oligonucleotide; TTT chr2 60462408 60462429 60462413 60462408 -
tgcaggtaaagatgagcccagc

SEQ ID NO: 225767 - DNA, 22 bp, Artificial Sequence
  Synthetic oligonucleotide; TTT chr2 60462407 60462428 60462412 60462407 -
gcaggtaaagatgagcccagca

SEQ ID NO: 225768 - DNA, 22 bp, Artificial Sequence
  Synthetic oligonucleotide; TTG chr2 60462406 60462427 60462411 60462406 -
caggtaaagatgagcccagcag

SEQ ID NO: 225769 - DNA, 22 bp, Artificial Sequence
  Synthetic oligonucleotide; CTA chr2 60462381 60462402 60462386 60462381 -
cacatgtacaacttgcaaacag

SEQ ID NO: 225770 - DNA, 22 bp, Artificial Sequence
  Synthetic oligonucleotide; CTT chr2 60462367 60462388 60462372 60462367 -
gcaaacagccattcaccagtgc

SEQ ID NO: 225771 - DNA, 22 bp, Artificial Sequence
  Synthetic oligonucleotide; TTG chr2 60462366 60462387 60462371 60462366 -
caaacagccattcaccagtgca

SEQ ID NO: 225772 - DNA, 22 bp, Artificial Sequence
  Synthetic oligonucleotide; TTC chr2 60462353 60462374 60462358 60462353 -
accagtgcatggtttctcttgc

SEQ ID NO: 225773 - DNA, 22 bp, Artificial Sequence
  Synthetic oligonucleotide; TTT chr2 60462338 60462359 60462343 60462338 -
ctcttgcaacacgcacagaaca

SEQ ID NO: 225774 - DNA, 22 bp, Artificial Sequence
  Synthetic oligonucleotide; TTC chr2 60462337 60462358 60462342 60462337 -
tcttgcaacacgcacagaacac

SEQ ID NO: 225775 - DNA, 22 bp, Artificial Sequence
  Synthetic oligonucleotide; CTC chr2 60462335 60462356 60462340 60462335 -
ttgcaacacgcacagaacactc

SEQ ID NO: 225776 - DNA, 22 bp, Artificial Sequence
  Synthetic oligonucleotide; CTT chr2 60462333 60462354 60462338 60462333 -
gcaacacgcacagaacactcat

SEQ ID NO: 225777 - DNA, 22 bp, Artificial Sequence
  Synthetic oligonucleotide; TTG chr2 60462332 60462353 60462337 60462332 -
caacacgcacagaacactcatg

SEQ ID NO: 225778 - DNA, 22 bp, Artificial Sequence
  Synthetic oligonucleotide; CTC chr2 60462313 60462334 60462318 60462313 -
atggattaagaatctacttaga

SEQ ID NO: 225779 - DNA, 22 bp, Artificial Sequence
  Synthetic oligonucleotide; TTA chr2 60462305 60462326 60462310 60462305 -
agaatctacttagaaagcgaac

SEQ ID NO: 225780 - DNA, 22 bp, Artificial Sequence
  Synthetic oligonucleotide; CTA chr2 60462297 60462318 60462302 60462297 -
cttagaaagcgaacacggaagt

SEQ ID NO: 225781 - DNA, 22 bp, Artificial Sequence
  Synthetic oligonucleotide; CTT chr2 60462294 60462315 60462299 60462294 -
agaaagcgaacacggaagtccc

SEQ ID NO: 225782 - DNA, 22 bp, Artificial Sequence
  Synthetic oligonucleotide; TTA chr2 60462293 60462314 60462298 60462293 -
gaaagcgaacacggaagtcccc

SEQ ID NO: 225783 - DNA, 22 bp, Artificial Sequence
  Synthetic oligonucleotide; CTG chr2 60462269 60462290 60462274 60462269 -
accccgcgggttggtatccctt

SEQ ID NO: 225784 - DNA, 22 bp, Artificial Sequence
  Synthetic oligonucleotide; TTG chr2 60462256 60462277 60462261 60462256 -
gtatcccttcaggactaggtgc

SEQ ID NO: 225785 - DNA, 22 bp, Artificial Sequence
  Synthetic oligonucleotide; CTT chr2 60462247 60462268 60462252 60462247 -
caggactaggtgcagaatgtcc

SEQ ID NO: 225786 - DNA, 22 bp, Artificial Sequence
  Synthetic oligonucleotide; TTC chr2 60462246 60462267 60462251 60462246 -
aggactaggtgcagaatgtcct

SEQ ID NO: 225787 - DNA, 22 bp, Artificial Sequence
  Synthetic oligonucleotide; CTA chr2 60462239 60462260 60462244 60462239 -
ggtgcagaatgtccttcccagc

SEQ ID NO: 225788 - DNA, 22 bp, Artificial Sequence
  Synthetic oligonucleotide; CTT chr2 60462223 60462244 60462228 60462223 -
cccagccacctctccatgggat

SEQ ID NO: 225789 - DNA, 22 bp, Artificial Sequence
  Synthetic oligonucleotide; TTC chr2 60462222 60462243 60462227 60462222 -
ccagccacctctccatgggatt

SEQ ID NO: 225790 - DNA, 22 bp, Artificial Sequence
  Synthetic oligonucleotide; CTC chr2 60462211 60462232 60462216 60462211 -
tccatgggattcatattgcaga

SEQ ID NO: 225791 - DNA, 22 bp, Artificial Sequence
  Synthetic oligonucleotide; CTC chr2 60462209 60462230 60462214 60462209 -
catgggattcatattgcagaca

SEQ ID NO: 225792 - DNA, 22 bp, Artificial Sequence
  Synthetic oligonucleotide; TTC chr2 60462199 60462220 60462204 60462199 -
atattgcagacaataacccctt

SEQ ID NO: 225793 - DNA, 22 bp, Artificial Sequence
  Synthetic oligonucleotide; TTG chr2 60462193 60462214 60462198 60462193 -
cagacaataacccctttaacct

SEQ ID NO: 225794 - DNA, 22 bp, Artificial Sequence
  Synthetic oligonucleotide; CTT chr2 60462177 60462198 60462182 60462177 -
taacctgctaagaataccagga

SEQ ID NO: 225795 - DNA, 22 bp, Artificial Sequence
  Synthetic oligonucleotide; TTT chr2 60462176 60462197 60462181 60462176 -
aacctgctaagaataccaggat

SEQ ID NO: 225796 - DNA, 22 bp, Artificial Sequence
  Synthetic oligonucleotide; TTA chr2 60462175 60462196 60462180 60462175 -
acctgctaagaataccaggatc

SEQ ID NO: 225797 - DNA, 22 bp, Artificial Sequence
  Synthetic oligonucleotide; CTG chr2 60462170 60462191 60462175 60462170 -
ctaagaataccaggatcagtat

SEQ ID NO: 225798 - DNA, 22 bp, Artificial Sequence
  Synthetic oligonucleotide; CTA chr2 60462167 60462188 60462172 60462167 -
agaataccaggatcagtatcga

SEQ ID NO: 225799 - DNA, 22 bp, Artificial Sequence
  Synthetic oligonucleotide; CTT chr2 60462136 60462157 60462141 60462136 -
ccggcctggcagaagggcgctt

SEQ ID NO: 225800 - DNA, 22 bp, Artificial Sequence
  Synthetic oligonucleotide; TTC chr2 60462135 60462156 60462140 60462135 -
cggcctggcagaagggcgcttt

SEQ ID NO: 225801 - DNA, 22 bp, Artificial Sequence
  Synthetic oligonucleotide; CTG chr2 60462128 60462149 60462133 60462128 -
gcagaagggcgctttccaccca

SEQ ID NO: 225802 - DNA, 22 bp, Artificial Sequence
  Synthetic oligonucleotide; CTT chr2 60462114 60462135 60462119 60462114 -
tccacccactccccccctgttt

SEQ ID NO: 225803 - DNA, 22 bp, Artificial Sequence
  Synthetic oligonucleotide; TTT chr2 60462113 60462134 60462118 60462113 -
ccacccactccccccctgttta

SEQ ID NO: 225804 - DNA, 22 bp, Artificial Sequence
  Synthetic oligonucleotide; TTC chr2 60462112 60462133 60462117 60462112 -
cacccactccccccctgtttag

SEQ ID NO: 225805 - DNA, 22 bp, Artificial Sequence
  Synthetic oligonucleotide; CTC chr2 60462103 60462124 60462108 60462103 -
cccccctgtttagtccaccacc

SEQ ID NO: 225806 - DNA, 22 bp, Artificial Sequence
  Synthetic oligonucleotide; CTG chr2 60462095 60462116 60462100 60462095 -
tttagtccaccaccgagacatc

SEQ ID NO: 225807 - DNA, 22 bp, Artificial Sequence
  Synthetic oligonucleotide; TTT chr2 60462092 60462113 60462097 60462092 -
agtccaccaccgagacatcact

SEQ ID NO: 225808 - DNA, 22 bp, Artificial Sequence
  Synthetic oligonucleotide; TTA chr2 60462091 60462112 60462096 60462091 -
gtccaccaccgagacatcactt

SEQ ID NO: 225809 - DNA, 22 bp, Artificial Sequence
  Synthetic oligonucleotide; CTT chr2 60462069 60462090 60462074 60462069 -
ggacccccaccgcatagagcgc

SEQ ID NO: 225810 - DNA, 22 bp, Artificial Sequence
  Synthetic oligonucleotide; TTG chr2 60462068 60462089 60462073 60462068 -
gacccccaccgcatagagcgcc

SEQ ID NO: 225811 - DNA, 22 bp, Artificial Sequence
  Synthetic oligonucleotide; CTG chr2 60462044 60462065 60462049 60462044 -
ggggcggaagagatggccctgg

SEQ ID NO: 225812 - DNA, 22 bp, Artificial Sequence
  Synthetic oligonucleotide; CTG chr2 60462023 60462044 60462028 60462023 -
gccacccatcacccgagtgcct

SEQ ID NO: 225813 - DNA, 22 bp, Artificial Sequence
  Synthetic oligonucleotide; CTT chr2 60462000 60462021 60462005 60462000 -
tgacagggtgctgcggttgaat

SEQ ID NO: 225814 - DNA, 22 bp, Artificial Sequence
  Synthetic oligonucleotide; TTT chr2 60461999 60462020 60462004 60461999 -
gacagggtgctgcggttgaatc

SEQ ID NO: 225815 - DNA, 22 bp, Artificial Sequence
  Synthetic oligonucleotide; TTG chr2 60461998 60462019 60462003 60461998 -
acagggtgctgcggttgaatcc

SEQ ID NO: 225816 - DNA, 22 bp, Artificial Sequence
  Synthetic oligonucleotide; CTG chr2 60461987 60462008 60461992 60461987 -
cggttgaatccaatggctatgg

SEQ ID NO: 225817 - DNA, 22 bp, Artificial Sequence
  Synthetic oligonucleotide; TTG chr2 60461981 60462002 60461986 60461981 -
aatccaatggctatggagcctc

SEQ ID NO: 225818 - DNA, 22 bp, Artificial Sequence
  Synthetic oligonucleotide; CTA chr2 60461968 60461989 60461973 60461968 -
tggagcctcccgccatggattt

SEQ ID NO: 225819 - DNA, 22 bp, Artificial Sequence
  Synthetic oligonucleotide; CTC chr2 60461959 60461980 60461964 60461959 -
ccgccatggatttctctaggag

SEQ ID NO: 225820 - DNA, 22 bp, Artificial Sequence
  Synthetic oligonucleotide; TTT chr2 60461946 60461967 60461951 60461946 -
ctctaggagacttagagagctg

SEQ ID NO: 225821 - DNA, 22 bp, Artificial Sequence
  Synthetic oligonucleotide; TTC chr2 60461945 60461966 60461950 60461945 -
tctaggagacttagagagctgg

SEQ ID NO: 225822 - DNA, 22 bp, Artificial Sequence
  Synthetic oligonucleotide; CTC chr2 60461943 60461964 60461948 60461943 -
taggagacttagagagctggca

SEQ ID NO: 225823 - DNA, 22 bp, Artificial Sequence
  Synthetic oligonucleotide; CTA chr2 60461941 60461962 60461946 60461941 -
ggagacttagagagctggcagg

SEQ ID NO: 225824 - DNA, 22 bp, Artificial Sequence
  Synthetic oligonucleotide; CTT chr2 60461933 60461954 60461938 60461933 -
agagagctggcagggaacacgt

SEQ ID NO: 225825 - DNA, 22 bp, Artificial Sequence
  Synthetic oligonucleotide; TTA chr2 60461932 60461953 60461937 60461932 -
gagagctggcagggaacacgtc

SEQ ID NO: 225826 - DNA, 22 bp, Artificial Sequence
  Synthetic oligonucleotide; CTG chr2 60461924 60461945 60461929 60461924 -
gcagggaacacgtctagcccac

SEQ ID NO: 225827 - DNA, 22 bp, Artificial Sequence
  Synthetic oligonucleotide; CTA chr2 60461908 60461929 60461913 60461908 -
gcccaccgctgtccccaggccg

SEQ ID NO: 225828 - DNA, 22 bp, Artificial Sequence
  Synthetic oligonucleotide; CTG chr2 60461897 60461918 60461902 60461897 -
tccccaggccggcccagcccta

SEQ ID NO: 225829 - DNA, 22 bp, Artificial Sequence
  Synthetic oligonucleotide; CTA chr2 60461875 60461896 60461880 60461875 -
tgcaaaggttactgcaaccatt

SEQ ID NO: 225830 - DNA, 22 bp, Artificial Sequence
  Synthetic oligonucleotide; TTA chr2 60461864 60461885 60461869 60461864 -
ctgcaaccattccagccaggta

SEQ ID NO: 225831 - DNA, 22 bp, Artificial Sequence
  Synthetic oligonucleotide; CTG chr2 60461861 60461882 60461866 60461861 -
caaccattccagccaggtagca

SEQ ID NO: 225832 - DNA, 22 bp, Artificial Sequence
  Synthetic oligonucleotide; TTC chr2 60461852 60461873 60461857 60461852 -
cagccaggtagcaagccgccct

SEQ ID NO: 225833 - DNA, 22 bp, Artificial Sequence
  Synthetic oligonucleotide; CTT chr2 60461829 60461850 60461834 60461829 -
cctggcgacgccccccctccct

SEQ ID NO: 225834 - DNA, 22 bp, Artificial Sequence
  Synthetic oligonucleotide; TTC chr2 60461828 60461849 60461833 60461828 -
ctggcgacgccccccctccctc

SEQ ID NO: 225835 - DNA, 22 bp, Artificial Sequence
  Synthetic oligonucleotide; CTG chr2 60461825 60461846 60461830 60461825 -
gcgacgccccccctccctcctc

SEQ ID NO: 225836 - DNA, 22 bp, Artificial Sequence
  Synthetic oligonucleotide; CTC chr2 60461810 60461831 60461815 60461810 -
cctcctctgcaatccgcccctc

SEQ ID NO: 225837 - DNA, 22 bp, Artificial Sequence
  Synthetic oligonucleotide; CTC chr2 60461806 60461827 60461811 60461806 -
ctctgcaatccgcccctcctcc

SEQ ID NO: 225838 - DNA, 22 bp, Artificial Sequence
  Synthetic oligonucleotide; CTC chr2 60461803 60461824 60461808 60461803 -
tgcaatccgcccctcctccctc

SEQ ID NO: 225839 - DNA, 22 bp, Artificial Sequence
  Synthetic oligonucleotide; CTG chr2 60461801 60461822 60461806 60461801 -
caatccgcccctcctccctccc

SEQ ID NO: 225840 - DNA, 22 bp, Artificial Sequence
  Synthetic oligonucleotide; CTC chr2 60461788 60461809 60461793 60461788 -
ctccctcccagcccccggtcaa

SEQ ID NO: 225841 - DNA, 22 bp, Artificial Sequence
  Synthetic oligonucleotide; CTC chr2 60461785 60461806 60461790 60461785 -
cctcccagcccccggtcaagtc

SEQ ID NO: 225842 - DNA, 22 bp, Artificial Sequence
  Synthetic oligonucleotide; CTC chr2 60461781 60461802 60461786 60461781 -
ccagcccccggtcaagtccaag

SEQ ID NO: 225843 - DNA, 22 bp, Artificial Sequence
  Synthetic oligonucleotide; TTC chr2 60461747 60461768 60461752 60461747 -
tgcggcaagacgttcaaatttc

SEQ ID NO: 225844 - DNA, 22 bp, Artificial Sequence
  Synthetic oligonucleotide; CTG chr2 60461745 60461766 60461750 60461745 -
cggcaagacgttcaaatttcag

SEQ ID NO: 225845 - DNA, 22 bp, Artificial Sequence
  Synthetic oligonucleotide; TTC chr2 60461732 60461753 60461737 60461732 -
aaatttcagagcaacctggtgg

SEQ ID NO: 225846 - DNA, 22 bp, Artificial Sequence
  Synthetic oligonucleotide; TTT chr2 60461726 60461747 60461731 60461726 -
cagagcaacctggtggtgcacc

SEQ ID NO: 225847 - DNA, 22 bp, Artificial Sequence
  Synthetic oligonucleotide; TTC chr2 60461725 60461746 60461730 60461725 -
agagcaacctggtggtgcaccg

SEQ ID NO: 225848 - DNA, 22 bp, Artificial Sequence
  Synthetic oligonucleotide; CTG chr2 60461714 60461735 60461719 60461714 -
gtggtgcaccggcgcagccaca

SEQ ID NO: 225849 - DNA, 22 bp, Artificial Sequence
  Synthetic oligonucleotide; CTA chr2 60461676 60461697 60461681 60461676 -
caagtgcaacctgtgcgaccac

SEQ ID NO: 225850 - DNA, 22 bp, Artificial Sequence
  Synthetic oligonucleotide; CTG chr2 60461663 60461684 60461668 60461663 -
tgcgaccacgcgtgcacccagg

SEQ ID NO: 225851 - DNA, 22 bp, Artificial Sequence
  Synthetic oligonucleotide; CTG chr2 60461630 60461651 60461635 60461630 -
aagcgccacatgaagacgcaca

SEQ ID NO: 225852 - DNA, 22 bp, Artificial Sequence
  Synthetic oligonucleotide; CTC chr2 60461564 60461585 60461569 60461564 -
tccaccgccagctccccggaac

SEQ ID NO: 225853 - DNA, 22 bp, Artificial Sequence
  Synthetic oligonucleotide; CTC chr2 60461562 60461583 60461567 60461562 -
caccgccagctccccggaaccc

SEQ ID NO: 225854 - DNA, 22 bp, Artificial Sequence
  Synthetic oligonucleotide; CTC chr2 60461550 60461571 60461555 60461550 -
cccggaacccggcaccagcgac

SEQ ID NO: 225855 - DNA, 22 bp, Artificial Sequence
  Synthetic oligonucleotide; CTT chr2 60461526 60461547 60461531 60461526 -
ggtgggcagcgccagcagcgcg

SEQ ID NO: 225856 - DNA, 22 bp, Artificial Sequence
  Synthetic oligonucleotide; TTG chr2 60461525 60461546 60461530 60461525 -
gtgggcagcgccagcagcgcgc

SEQ ID NO: 225857 - DNA, 22 bp, Artificial Sequence
  Synthetic oligonucleotide; CTC chr2 60461501 60461522 60461506 60461501 -
aagtccgtggtggccaagttca

SEQ ID NO: 225858 - DNA, 22 bp, Artificial Sequence
  Synthetic oligonucleotide; TTC chr2 60461480 60461501 60461485 60461480 -
aagagcgagaacgaccccaacc

SEQ ID NO: 225859 - DNA, 22 bp, Artificial Sequence
  Synthetic oligonucleotide; CTG chr2 60461456 60461477 60461461 60461456 -
atcccggagaacggggacgagg

SEQ ID NO: 225860 - DNA, 22 bp, Artificial Sequence
  Synthetic oligonucleotide; CTG chr2 60461375 60461396 60461380 60461375 -
acggagagcgagagggtggact

SEQ ID NO: 225861 - DNA, 22 bp, Artificial Sequence
  Synthetic oligonucleotide; CTA chr2 60461352 60461373 60461357 60461352 -
cggcttcgggctgagcctggag

SEQ ID NO: 225862 - DNA, 22 bp, Artificial Sequence
  Synthetic oligonucleotide; CTT chr2 60461346 60461367 60461351 60461346 -
cgggctgagcctggaggcggcg

SEQ ID NO: 225863 - DNA, 22 bp, Artificial Sequence
  Synthetic oligonucleotide; TTC chr2 60461345 60461366 60461350 60461345 -
gggctgagcctggaggcggcgc

SEQ ID NO: 225864 - DNA, 22 bp, Artificial Sequence
  Synthetic oligonucleotide; CTG chr2 60461339 60461360 60461344 60461339 -
agcctggaggcggcgcgccacc

SEQ ID NO: 225865 - DNA, 22 bp, Artificial Sequence
  Synthetic oligonucleotide; CTG chr2 60461333 60461354 60461338 60461333 -
gaggcggcgcgccaccacgaga

SEQ ID NO: 225866 - DNA, 22 bp, Artificial Sequence
  Synthetic oligonucleotide; CTC chr2 60461304 60461325 60461309 60461304 -
gcggggcgcggtcgtgggcgtg

SEQ ID NO: 225867 - DNA, 22 bp, Artificial Sequence
  Synthetic oligonucleotide; CTG chr2 60461261 60461282 60461266 60461261 -
cccgacgtcatgcagggcatgg

SEQ ID NO: 225868 - DNA, 22 bp, Artificial Sequence
  Synthetic oligonucleotide; CTC chr2 60461234 60461255 60461239 60461234 -
agctccatgcagcacttcagcg

SEQ ID NO: 225869 - DNA, 22 bp, Artificial Sequence
  Synthetic oligonucleotide; CTC chr2 60461229 60461250 60461234 60461229 -
catgcagcacttcagcgaggcc

SEQ ID NO: 225870 - DNA, 22 bp, Artificial Sequence
  Synthetic oligonucleotide; CTT chr2 60461217 60461238 60461222 60461217 -
cagcgaggccttccaccaggtc

SEQ ID NO: 225871 - DNA, 22 bp, Artificial Sequence
  Synthetic oligonucleotide; TTC chr2 60461216 60461237 60461221 60461216 -
agcgaggccttccaccaggtcc

SEQ ID NO: 225872 - DNA, 22 bp, Artificial Sequence
  Synthetic oligonucleotide; CTT chr2 60461205 60461226 60461210 60461205 -
ccaccaggtcctgggcgagaag

SEQ ID NO: 225873 - DNA, 22 bp, Artificial Sequence
  Synthetic oligonucleotide; TTC chr2 60461204 60461225 60461209 60461204 -
caccaggtcctgggcgagaagc

SEQ ID NO: 225874 - DNA, 22 bp, Artificial Sequence
  Synthetic oligonucleotide; CTG chr2 60461192 60461213 60461197 60461192 -
ggcgagaagcataagcgcggcc

SEQ ID NO: 225875 - DNA, 22 bp, Artificial Sequence
  Synthetic oligonucleotide; CTG chr2 60461165 60461186 60461170 60461165 -
gccgaggccgagggccacaggg

SEQ ID NO: 225876 - DNA, 22 bp, Artificial Sequence
  Synthetic oligonucleotide; CTT chr2 60461137 60461158 60461142 60461137 -
gcgacgaagactcggtggccgg

SEQ ID NO: 225877 - DNA, 22 bp, Artificial Sequence
  Synthetic oligonucleotide; TTG chr2 60461136 60461157 60461141 60461136 -
cgacgaagactcggtggccggc

SEQ ID NO: 225878 - DNA, 22 bp, Artificial Sequence
  Synthetic oligonucleotide; CTC chr2 60461124 60461145 60461129 60461124 -
ggtggccggcgagtcggaccgc

SEQ ID NO: 225879 - DNA, 22 bp, Artificial Sequence
  Synthetic oligonucleotide; CTG chr2 60461086 60461107 60461091 60461086 -
ttaatggccgcggctgctcccc

SEQ ID NO: 225880 - DNA, 22 bp, Artificial Sequence
  Synthetic oligonucleotide; TTA chr2 60461083 60461104 60461088 60461083 -
atggccgcggctgctccccggg

SEQ ID NO: 225881 - DNA, 22 bp, Artificial Sequence
  Synthetic oligonucleotide; CTG chr2 60461070 60461091 60461075 60461070 -
ctccccgggcgagtcggcctcg

SEQ ID NO: 225882 - DNA, 22 bp, Artificial Sequence
  Synthetic oligonucleotide; CTC chr2 60461067 60461088 60461072 60461067 -
cccgggcgagtcggcctcgggg

SEQ ID NO: 225883 - DNA, 22 bp, Artificial Sequence
  Synthetic oligonucleotide; CTC chr2 60461049 60461070 60461054 60461049 -
ggggggcctgtccaaaaagctg

SEQ ID NO: 225884 - DNA, 22 bp, Artificial Sequence
  Synthetic oligonucleotide; CTG chr2 60461039 60461060 60461044 60461039 -
tccaaaaagctgctgctgggca

SEQ ID NO: 225885 - DNA, 22 bp, Artificial Sequence
  Synthetic oligonucleotide; CTG chr2 60461027 60461048 60461032 60461027 -
ctgctgggcagccccagctcgc

SEQ ID NO: 225886 - DNA, 22 bp, Artificial Sequence
  Synthetic oligonucleotide; CTG chr2 60461024 60461045 60461029 60461024 -
ctgggcagccccagctcgctga

SEQ ID NO: 225887 - DNA, 22 bp, Artificial Sequence
  Synthetic oligonucleotide; CTG chr2 60461021 60461042 60461026 60461021 -
ggcagccccagctcgctgagcc

SEQ ID NO: 225888 - DNA, 22 bp, Artificial Sequence
  Synthetic oligonucleotide; CTC chr2 60461007 60461028 60461012 60461007 -
gctgagccccttctctaagcgc

SEQ ID NO: 225889 - DNA, 22 bp, Artificial Sequence
  Synthetic oligonucleotide; CTG chr2 60461003 60461024 60461008 60461003 -
agccccttctctaagcgcatca

SEQ ID NO: 225890 - DNA, 22 bp, Artificial Sequence
  Synthetic oligonucleotide; CTT chr2 60460995 60461016 60461000 60460995 -
ctctaagcgcatcaagctcgag

SEQ ID NO: 225891 - DNA, 22 bp, Artificial Sequence
  Synthetic oligonucleotide; TTC chr2 60460994 60461015 60460999 60460994 -
tctaagcgcatcaagctcgaga

SEQ ID NO: 225892 - DNA, 22 bp, Artificial Sequence
  Synthetic oligonucleotide; CTC chr2 60460992 60461013 60460997 60460992 -
taagcgcatcaagctcgagaag

SEQ ID NO: 225893 - DNA, 22 bp, Artificial Sequence
  Synthetic oligonucleotide; CTA chr2 60460990 60461011 60460995 60460990 -
agcgcatcaagctcgagaagga

SEQ ID NO: 225894 - DNA, 22 bp, Artificial Sequence
  Synthetic oligonucleotide; CTC chr2 60460976 60460997 60460981 60460976 -
gagaaggagttcgacctgcccc

SEQ ID NO: 225895 - DNA, 22 bp, Artificial Sequence
  Synthetic oligonucleotide; TTC chr2 60460964 60460985 60460969 60460964 -
gacctgcccccggccgcgatgc

SEQ ID NO: 225896 - DNA, 22 bp, Artificial Sequence
  Synthetic oligonucleotide; CTG chr2 60460958 60460979 60460963 60460958 -
cccccggccgcgatgcccaaca

SEQ ID NO: 225897 - DNA, 22 bp, Artificial Sequence
  Synthetic oligonucleotide; CTC chr2 60460920 60460941 60460925 60460920 -
gcagtggctcgccggctacgcg

SEQ ID NO: 225898 - DNA, 22 bp, Artificial Sequence
  Synthetic oligonucleotide; CTC chr2 60460910 60460931 60460915 60460910 -
gccggctacgcggcctccaggc

SEQ ID NO: 225899 - DNA, 22 bp, Artificial Sequence
  Synthetic oligonucleotide; CTA chr2 60460902 60460923 60460907 60460902 -
cgcggcctccaggcagctcaaa

SEQ ID NO: 225900 - DNA, 22 bp, Artificial Sequence
  Synthetic oligonucleotide; CTC chr2 60460893 60460914 60460898 60460893 -
caggcagctcaaagatcccttc

SEQ ID NO: 225901 - DNA, 22 bp, Artificial Sequence
  Synthetic oligonucleotide; CTC chr2 60460883 60460904 60460888 60460883 -
aaagatcccttccttagcttcg

SEQ ID NO: 225902 - DNA, 22 bp, Artificial Sequence
  Synthetic oligonucleotide; CTT chr2 60460872 60460893 60460877 60460872 -
ccttagcttcggagactccaga

SEQ ID NO: 225903 - DNA, 22 bp, Artificial Sequence
  Synthetic oligonucleotide; TTC chr2 60460871 60460892 60460876 60460871 -
cttagcttcggagactccagac

SEQ ID NO: 225904 - DNA, 22 bp, Artificial Sequence
  Synthetic oligonucleotide; CTT chr2 60460868 60460889 60460873 60460868 -
agcttcggagactccagacaat

SEQ ID NO: 225905 - DNA, 22 bp, Artificial Sequence
  Synthetic oligonucleotide; TTA chr2 60460867 60460888 60460872 60460867 -
gcttcggagactccagacaatc

SEQ ID NO: 225906 - DNA, 22 bp, Artificial Sequence
  Synthetic oligonucleotide; CTT chr2 60460863 60460884 60460868 60460863 -
cggagactccagacaatcgcct

SEQ ID NO: 225907 - DNA, 22 bp, Artificial Sequence
  Synthetic oligonucleotide; TTC chr2 60460862 60460883 60460867 60460862 -
ggagactccagacaatcgcctt

SEQ ID NO: 225908 - DNA, 22 bp, Artificial Sequence
  Synthetic oligonucleotide; CTC chr2 60460854 60460875 60460859 60460854 -
cagacaatcgccttttgcctcc

SEQ ID NO: 225909 - DNA, 22 bp, Artificial Sequence
  Synthetic oligonucleotide; CTT chr2 60460840 60460861 60460845 60460840 -
ttgcctcctcgtcggagcactc

SEQ ID NO: 225910 - DNA, 22 bp, Artificial Sequence
  Synthetic oligonucleotide; TTT chr2 60460839 60460860 60460844 60460839 -
tgcctcctcgtcggagcactcc

SEQ ID NO: 225911 - DNA, 22 bp, Artificial Sequence
  Synthetic oligonucleotide; TTT chr2 60460838 60460859 60460843 60460838 -
gcctcctcgtcggagcactcct

SEQ ID NO: 225912 - DNA, 22 bp, Artificial Sequence
  Synthetic oligonucleotide; TTG chr2 60460837 60460858 60460842 60460837 -
cctcctcgtcggagcactcctc

SEQ ID NO: 225913 - DNA, 22 bp, Artificial Sequence
  Synthetic oligonucleotide; CTC chr2 60460833 60460854 60460838 60460833 -
ctcgtcggagcactcctcggag

SEQ ID NO: 225914 - DNA, 22 bp, Artificial Sequence
  Synthetic oligonucleotide; CTC chr2 60460830 60460851 60460835 60460830 -
gtcggagcactcctcggagaac

SEQ ID NO: 225915 - DNA, 22 bp, Artificial Sequence
  Synthetic oligonucleotide; CTC chr2 60460818 60460839 60460823 60460818 -
ctcggagaacgggagtttgcgc

SEQ ID NO: 225916 - DNA, 22 bp, Artificial Sequence
  Synthetic oligonucleotide; CTC chr2 60460815 60460836 60460820 60460815 -
ggagaacgggagtttgcgcttc

SEQ ID NO: 225917 - DNA, 22 bp, Artificial Sequence
  Synthetic oligonucleotide; TTT chr2 60460800 60460821 60460805 60460800 -
gcgcttctccacaccgcccggg

SEQ ID NO: 225918 - DNA, 22 bp, Artificial Sequence
  Synthetic oligonucleotide; TTG chr2 60460799 60460820 60460804 60460799 -
cgcttctccacaccgcccgggg

SEQ ID NO: 225919 - DNA, 22 bp, Artificial Sequence
  Synthetic oligonucleotide; CTT chr2 60460794 60460815 60460799 60460794 -
ctccacaccgcccggggagctg

SEQ ID NO: 225920 - DNA, 22 bp, Artificial Sequence
  Synthetic oligonucleotide; TTC chr2 60460793 60460814 60460798 60460793 -
tccacaccgcccggggagctgg

SEQ ID NO: 225921 - DNA, 22 bp, Artificial Sequence
  Synthetic oligonucleotide; CTC chr2 60460791 60460812 60460796 60460791 -
cacaccgcccggggagctggac

SEQ ID NO: 225922 - DNA, 22 bp, Artificial Sequence
  Synthetic oligonucleotide; CTG chr2 60460772 60460793 60460777 60460772 -
gacggagggatctcggggcgca

SEQ ID NO: 225923 - DNA, 22 bp, Artificial Sequence
  Synthetic oligonucleotide; CTC chr2 60460758 60460779 60460763 60460758 -
ggggcgcagcggcacgggaagt

SEQ ID NO: 225924 - DNA, 22 bp, Artificial Sequence
  Synthetic oligonucleotide; TTA chr2 60460714 60460735 60460719 60460714 -
gtggtccgggcccgggcaggcc

SEQ ID NO: 225925 - DNA, 22 bp, Artificial Sequence
  Synthetic oligonucleotide; CTC chr2 60460686 60460707 60460691 60460686 -
aaaagagggcagacgcagcgac

SEQ ID NO: 225926 - DNA, 22 bp, Artificial Sequence
  Synthetic oligonucleotide; CTT chr2 60460660 60460681 60460665 60460660 -
gtgagtactgtgggaaagtctt

SEQ ID NO: 225927 - DNA, 22 bp, Artificial Sequence
  Synthetic oligonucleotide; TTG chr2 60460659 60460680 60460664 60460659 -
tgagtactgtgggaaagtcttc

SEQ ID NO: 225928 - DNA, 22 bp, Artificial Sequence
  Synthetic oligonucleotide; CTG chr2 60460650 60460671 60460655 60460650 -
tgggaaagtcttcaagaactgt

SEQ ID NO: 225929 - DNA, 22 bp, Artificial Sequence
  Synthetic oligonucleotide; CTT chr2 60460638 60460659 60460643 60460638 -
caagaactgtagcaatctcact

SEQ ID NO: 225930 - DNA, 22 bp, Artificial Sequence
  Synthetic oligonucleotide; TTC chr2 60460637 60460658 60460642 60460637 -
aagaactgtagcaatctcactg

SEQ ID NO: 225931 - DNA, 22 bp, Artificial Sequence
  Synthetic oligonucleotide; CTG chr2 60460629 60460650 60460634 60460629 -
tagcaatctcactgtccacagg

SEQ ID NO: 225932 - DNA, 22 bp, Artificial Sequence
  Synthetic oligonucleotide; CTC chr2 60460619 60460640 60460624 60460619 -
actgtccacaggagaagccaca

SEQ ID NO: 225933 - DNA, 22 bp, Artificial Sequence
  Synthetic oligonucleotide; CTG chr2 60460615 60460636 60460620 60460615 -
tccacaggagaagccacacggg

SEQ ID NO: 225934 - DNA, 22 bp, Artificial Sequence
  Synthetic oligonucleotide; CTT chr2 60460582 60460603 60460587 60460582 -
ataaatgcgagctgtgcaacta

SEQ ID NO: 225935 - DNA, 22 bp, Artificial Sequence
  Synthetic oligonucleotide; TTA chr2 60460581 60460602 60460586 60460581 -
taaatgcgagctgtgcaactat

SEQ ID NO: 225936 - DNA, 22 bp, Artificial Sequence
  Synthetic oligonucleotide; CTG chr2 60460568 60460589 60460573 60460568 -
tgcaactatgcctgtgcccaga

SEQ ID NO: 225937 - DNA, 22 bp, Artificial Sequence
  Synthetic oligonucleotide; CTA chr2 60460560 60460581 60460565 60460560 -
tgcctgtgcccagagtagcaag

SEQ ID NO: 225938 - DNA, 22 bp, Artificial Sequence
  Synthetic oligonucleotide; CTG chr2 60460554 60460575 60460559 60460554 -
tgcccagagtagcaagctcacc

SEQ ID NO: 225939 - DNA, 22 bp, Artificial Sequence
  Synthetic oligonucleotide; CTC chr2 60460535 60460556 60460540 60460535 -
accaggcacatgaaaacgcatg

SEQ ID NO: 225940 - DNA, 22 bp, Artificial Sequence
  Synthetic oligonucleotide; TTT chr2 60460492 60460513 60460497 60460492 -
acaaatgtgaaatttgtaagat

SEQ ID NO: 225941 - DNA, 22 bp, Artificial Sequence
  Synthetic oligonucleotide; TTA chr2 60460491 60460512 60460496 60460491 -
caaatgtgaaatttgtaagatg

SEQ ID NO: 225942 - DNA, 22 bp, Artificial Sequence
  Synthetic oligonucleotide; TTT chr2 60460477 60460498 60460482 60460477 -
gtaagatgccttttagcgtgta

SEQ ID NO: 225943 - DNA, 22 bp, Artificial Sequence
  Synthetic oligonucleotide; TTG chr2 60460476 60460497 60460481 60460476 -
taagatgccttttagcgtgtac

SEQ ID NO: 225944 - DNA, 22 bp, Artificial Sequence
  Synthetic oligonucleotide; CTT chr2 60460465 60460486 60460470 60460465 -
ttagcgtgtacagtaccctgga

SEQ ID NO: 225945 - DNA, 22 bp, Artificial Sequence
  Synthetic oligonucleotide; TTT chr2 60460464 60460485 60460469 60460464 -
tagcgtgtacagtaccctggag

SEQ ID NO: 225946 - DNA, 22 bp, Artificial Sequence
  Synthetic oligonucleotide; TTT chr2 60460463 60460484 60460468 60460463 -
agcgtgtacagtaccctggaga

SEQ ID NO: 225947 - DNA, 22 bp, Artificial Sequence
  Synthetic oligonucleotide; TTA chr2 60460462 60460483 60460467 60460462 -
gcgtgtacagtaccctggagaa

SEQ ID NO: 225948 - DNA, 22 bp, Artificial Sequence
  Synthetic oligonucleotide; CTG chr2 60460445 60460466 60460450 60460445 -
gagaaacacatgaaaaaatggc

SEQ ID NO: 225949 - DNA, 22 bp, Artificial Sequence
  Synthetic oligonucleotide; TTG chr2 60460406 60460427 60460411 60460406 -
aataatgatataaaaactgaat

SEQ ID NO: 225950 - DNA, 22 bp, Artificial Sequence
  Synthetic oligonucleotide; CTG chr2 60460387 60460408 60460392 60460387 -
aatagaggtatattaatacccc

SEQ ID NO: 225951 - DNA, 22 bp, Artificial Sequence
  Synthetic oligonucleotide; TTA chr2 60460372 60460393 60460377 60460372 -
atacccctccctcactcccacc

SEQ ID NO: 225952 - DNA, 22 bp, Artificial Sequence
  Synthetic oligonucleotide; CTC chr2 60460363 60460384 60460368 60460363 -
cctcactcccacctgacacccc

SEQ ID NO: 225953 - DNA, 22 bp, Artificial Sequence
  Synthetic oligonucleotide; CTC chr2 60460359 60460380 60460364 60460359 -
actcccacctgacacccccttt

SEQ ID NO: 225954 - DNA, 22 bp, Artificial Sequence
  Synthetic oligonucleotide; CTC chr2 60460355 60460376 60460360 60460355 -
ccacctgacaccccctttttca

SEQ ID NO: 225955 - DNA, 22 bp, Artificial Sequence
  Synthetic oligonucleotide; CTG chr2 60460348 60460369 60460353 60460348 -
acaccccctttttcaccactcc

SEQ ID NO: 225956 - DNA, 22 bp, Artificial Sequence
  Synthetic oligonucleotide; CTT chr2 60460338 60460359 60460343 60460338 -
tttcaccactccccttccccat

SEQ ID NO: 225957 - DNA, 22 bp, Artificial Sequence
  Synthetic oligonucleotide; TTT chr2 60460337 60460358 60460342 60460337 -
ttcaccactccccttccccatc

SEQ ID NO: 225958 - DNA, 22 bp, Artificial Sequence
  Synthetic oligonucleotide; TTT chr2 60460336 60460357 60460341 60460336 -
tcaccactccccttccccatcg

SEQ ID NO: 225959 - DNA, 22 bp, Artificial Sequence
  Synthetic oligonucleotide; TTT chr2 60460335 60460356 60460340 60460335 -
caccactccccttccccatcgc

SEQ ID NO: 225960 - DNA, 22 bp, Artificial Sequence
  Synthetic oligonucleotide; TTC chr2 60460334 60460355 60460339 60460334 -
accactccccttccccatcgcc

SEQ ID NO: 225961 - DNA, 22 bp, Artificial Sequence
  Synthetic oligonucleotide; CTC chr2 60460327 60460348 60460332 60460327 -
cccttccccatcgccctccagc

SEQ ID NO: 225962 - DNA, 22 bp, Artificial Sequence
  Synthetic oligonucleotide; CTT chr2 60460322 60460343 60460327 60460322 -
ccccatcgccctccagccccac

SEQ ID NO: 225963 - DNA, 22 bp, Artificial Sequence
  Synthetic oligonucleotide; TTC chr2 60460321 60460342 60460326 60460321 -
cccatcgccctccagccccact

SEQ ID NO: 225964 - DNA, 22 bp, Artificial Sequence
  Synthetic oligonucleotide; CTC chr2 60460309 60460330 60460314 60460309 -
cagccccactccctgtaggatt

SEQ ID NO: 225965 - DNA, 22 bp, Artificial Sequence
  Synthetic oligonucleotide; CTC chr2 60460298 60460319 60460303 60460298 -
cctgtaggatttttttctagtc

SEQ ID NO: 225966 - DNA, 22 bp, Artificial Sequence
  Synthetic oligonucleotide; CTG chr2 60460294 60460315 60460299 60460294 -
taggatttttttctagtcccat

SEQ ID NO: 225967 - DNA, 22 bp, Artificial Sequence
  Synthetic oligonucleotide; TTT chr2 60460286 60460307 60460291 60460286 -
ttttctagtcccatgtgattta

SEQ ID NO: 225968 - DNA, 22 bp, Artificial Sequence
  Synthetic oligonucleotide; TTT chr2 60460285 60460306 60460290 60460285 -
tttctagtcccatgtgatttaa

SEQ ID NO: 225969 - DNA, 22 bp, Artificial Sequence
  Synthetic oligonucleotide; TTT chr2 60460284 60460305 60460289 60460284 -
ttctagtcccatgtgatttaaa

SEQ ID NO: 225970 - DNA, 22 bp, Artificial Sequence
  Synthetic oligonucleotide; TTT chr2 60460283 60460304 60460288 60460283 -
tctagtcccatgtgatttaaac

SEQ ID NO: 225971 - DNA, 22 bp, Artificial Sequence
  Synthetic oligonucleotide; TTT chr2 60460282 60460303 60460287 60460282 -
ctagtcccatgtgatttaaaca

SEQ ID NO: 225972 - DNA, 22 bp, Artificial Sequence
  Synthetic oligonucleotide; TTC chr2 60460281 60460302 60460286 60460281 -
tagtcccatgtgatttaaacaa

SEQ ID NO: 225973 - DNA, 22 bp, Artificial Sequence
  Synthetic oligonucleotide; CTA chr2 60460279 60460300 60460284 60460279 -
gtcccatgtgatttaaacaaac

SEQ ID NO: 225974 - DNA, 22 bp, Artificial Sequence
  Synthetic oligonucleotide; TTT chr2 60460265 60460286 60460270 60460265 -
aaacaaacaaacaaacaaacag

SEQ ID NO: 225975 - DNA, 22 bp, Artificial Sequence
  Synthetic oligonucleotide; TTA chr2 60460264 60460285 60460269 60460264 -
aacaaacaaacaaacaaacaga

SEQ ID NO: 225976 - DNA, 22 bp, Artificial Sequence
  Synthetic oligonucleotide; CTA chr2 60460229 60460250 60460234 60460229 -
agaatatgagagtgcttgtcac

SEQ ID NO: 225977 - DNA, 22 bp, Artificial Sequence
  Synthetic oligonucleotide; CTT chr2 60460212 60460233 60460217 60460212 -
gtcaccagcacacctgtttttt

SEQ ID NO: 225978 - DNA, 22 bp, Artificial Sequence
  Synthetic oligonucleotide; TTG chr2 60460211 60460232 60460216 60460211 -
tcaccagcacacctgttttttt

SEQ ID NO: 225979 - DNA, 22 bp, Artificial Sequence
  Synthetic oligonucleotide; CTG chr2 60460196 60460217 60460201 60460196 -
ttttttttctttttctttttct

SEQ ID NO: 225980 - DNA, 22 bp, Artificial Sequence
  Synthetic oligonucleotide; TTT chr2 60460193 60460214 60460198 60460193 -
tttttctttttctttttctttt

SEQ ID NO: 225981 - DNA, 22 bp, Artificial Sequence
  Synthetic oligonucleotide; TTT chr2 60460192 60460213 60460197 60460192 -
ttttctttttctttttcttttt

SEQ ID NO: 225982 - DNA, 22 bp, Artificial Sequence
  Synthetic oligonucleotide; TTT chr2 60460191 60460212 60460196 60460191 -
tttctttttctttttctttttt

SEQ ID NO: 225983 - DNA, 22 bp, Artificial Sequence
  Synthetic oligonucleotide; TTT chr2 60460190 60460211 60460195 60460190 -
ttctttttctttttcttttttc

SEQ ID NO: 225984 - DNA, 22 bp, Artificial Sequence
  Synthetic oligonucleotide; TTT chr2 60460189 60460210 60460194 60460189 -
tctttttctttttcttttttct

SEQ ID NO: 225985 - DNA, 22 bp, Artificial Sequence
  Synthetic oligonucleotide; TTT chr2 60460188 60460209 60460193 60460188 -
ctttttctttttcttttttctt

SEQ ID NO: 225986 - DNA, 22 bp, Artificial Sequence
  Synthetic oligonucleotide; TTC chr2 60460187 60460208 60460192 60460187 -
tttttctttttcttttttcttt

SEQ ID NO: 225987 - DNA, 22 bp, Artificial Sequence
  Synthetic oligonucleotide; CTT chr2 60460185 60460206 60460190 60460185 -
tttctttttcttttttcttttt

SEQ ID NO: 225988 - DNA, 22 bp, Artificial Sequence
  Synthetic oligonucleotide; TTT chr2 60460184 60460205 60460189 60460184 -
ttctttttcttttttctttttc

SEQ ID NO: 225989 - DNA, 22 bp, Artificial Sequence
  Synthetic oligonucleotide; TTT chr2 60460183 60460204 60460188 60460183 -
tctttttcttttttctttttcc

SEQ ID NO: 225990 - DNA, 22 bp, Artificial Sequence
  Synthetic oligonucleotide; TTT chr2 60460182 60460203 60460187 60460182 -
ctttttcttttttctttttcct

SEQ ID NO: 225991 - DNA, 22 bp, Artificial Sequence
  Synthetic oligonucleotide; TTC chr2 60460181 60460202 60460186 60460181 -
tttttcttttttctttttcctt

SEQ ID NO: 225992 - DNA, 22 bp, Artificial Sequence
  Synthetic oligonucleotide; CTT chr2 60460179 60460200 60460184 60460179 -
tttcttttttctttttcctttt

SEQ ID NO: 225993 - DNA, 22 bp, Artificial Sequence
  Synthetic oligonucleotide; TTT chr2 60460178 60460199 60460183 60460178 -
ttcttttttctttttccttttt

SEQ ID NO: 225994 - DNA, 22 bp, Artificial Sequence
  Synthetic oligonucleotide; TTT chr2 60460177 60460198 60460182 60460177 -
tcttttttctttttcctttttt

SEQ ID NO: 225995 - DNA, 22 bp, Artificial Sequence
  Synthetic oligonucleotide; TTT chr2 60460176 60460197 60460181 60460176 -
cttttttctttttccttttttt

SEQ ID NO: 225996 - DNA, 22 bp, Artificial Sequence
  Synthetic oligonucleotide; TTC chr2 60460175 60460196 60460180 60460175 -
ttttttctttttcctttttttt

SEQ ID NO: 225997 - DNA, 22 bp, Artificial Sequence
  Synthetic oligonucleotide; CTT chr2 60460173 60460194 60460178 60460173 -
ttttctttttcctttttttttt

SEQ ID NO: 225998 - DNA, 22 bp, Artificial Sequence
  Synthetic oligonucleotide; TTT chr2 60460172 60460193 60460177 60460172 -
tttctttttccttttttttttt

SEQ ID NO: 225999 - DNA, 22 bp, Artificial Sequence
  Synthetic oligonucleotide; TTT chr2 60460171 60460192 60460176 60460171 -
ttctttttcctttttttttttt

SEQ ID NO: 226000 - DNA, 22 bp, Artificial Sequence
  Synthetic oligonucleotide; TTT chr2 60460170 60460191 60460175 60460170 -
tctttttccttttttttttttt

SEQ ID NO: 226001 - DNA, 22 bp, Artificial Sequence
  Synthetic oligonucleotide; TTT chr2 60460169 60460190 60460174 60460169 -
ctttttcctttttttttttttt

SEQ ID NO: 226002 - DNA, 22 bp, Artificial Sequence
  Synthetic oligonucleotide; TTC chr2 60460168 60460189 60460173 60460168 -
tttttccttttttttttttttc

SEQ ID NO: 226003 - DNA, 22 bp, Artificial Sequence
  Synthetic oligonucleotide; CTT chr2 60460166 60460187 60460171 60460166 -
tttccttttttttttttttcct

SEQ ID NO: 226004 - DNA, 22 bp, Artificial Sequence
  Synthetic oligonucleotide; TTT chr2 60460165 60460186 60460170 60460165 -
ttccttttttttttttttcctt

SEQ ID NO: 226005 - DNA, 22 bp, Artificial Sequence
  Synthetic oligonucleotide; TTT chr2 60460164 60460185 60460169 60460164 -
tccttttttttttttttccttt

SEQ ID NO: 226006 - DNA, 22 bp, Artificial Sequence
  Synthetic oligonucleotide; TTT chr2 60460163 60460184 60460168 60460163 -
ccttttttttttttttccttta

SEQ ID NO: 226007 - DNA, 22 bp, Artificial Sequence
  Synthetic oligonucleotide; TTC chr2 60460162 60460183 60460167 60460162 -
cttttttttttttttcctttat

SEQ ID NO: 226008 - DNA, 22 bp, Artificial Sequence
  Synthetic oligonucleotide; CTT chr2 60460159 60460180 60460164 60460159 -
ttttttttttttcctttatgtt

SEQ ID NO: 226009 - DNA, 22 bp, Artificial Sequence
  Synthetic oligonucleotide; TTT chr2 60460158 60460179 60460163 60460158 -
tttttttttttcctttatgttc

SEQ ID NO: 226010 - DNA, 22 bp, Artificial Sequence
  Synthetic oligonucleotide; TTT chr2 60460157 60460178 60460162 60460157 -
ttttttttttcctttatgttct

SEQ ID NO: 226011 - DNA, 22 bp, Artificial Sequence
  Synthetic oligonucleotide; TTT chr2 60460156 60460177 60460161 60460156 -
tttttttttcctttatgttctc

SEQ ID NO: 226012 - DNA, 22 bp, Artificial Sequence
  Synthetic oligonucleotide; TTT chr2 60460155 60460176 60460160 60460155 -
ttttttttcctttatgttctca

SEQ ID NO: 226013 - DNA, 22 bp, Artificial Sequence
  Synthetic oligonucleotide; TTT chr2 60460154 60460175 60460159 60460154 -
tttttttcctttatgttctcac

SEQ ID NO: 226014 - DNA, 22 bp, Artificial Sequence
  Synthetic oligonucleotide; TTT chr2 60460153 60460174 60460158 60460153 -
ttttttcctttatgttctcacc

SEQ ID NO: 226015 - DNA, 22 bp, Artificial Sequence
  Synthetic oligonucleotide; TTT chr2 60460152 60460173 60460157 60460152 -
tttttcctttatgttctcaccg

SEQ ID NO: 226016 - DNA, 22 bp, Artificial Sequence
  Synthetic oligonucleotide; TTT chr2 60460151 60460172 60460156 60460151 -
ttttcctttatgttctcaccgt

SEQ ID NO: 226017 - DNA, 22 bp, Artificial Sequence
  Synthetic oligonucleotide; TTT chr2 60460150 60460171 60460155 60460150 -
tttcctttatgttctcaccgtt

SEQ ID NO: 226018 - DNA, 22 bp, Artificial Sequence
  Synthetic oligonucleotide; TTT chr2 60460149 60460170 60460154 60460149 -
ttcctttatgttctcaccgttt

SEQ ID NO: 226019 - DNA, 22 bp, Artificial Sequence
  Synthetic oligonucleotide; TTT chr2 60460148 60460169 60460153 60460148 -
tcctttatgttctcaccgtttg

SEQ ID NO: 226020 - DNA, 22 bp, Artificial Sequence
  Synthetic oligonucleotide; TTT chr2 60460147 60460168 60460152 60460147 -
cctttatgttctcaccgtttga

SEQ ID NO: 226021 - DNA, 22 bp, Artificial Sequence
  Synthetic oligonucleotide; TTC chr2 60460146 60460167 60460151 60460146 -
ctttatgttctcaccgtttgaa

SEQ ID NO: 226022 - DNA, 22 bp, Artificial Sequence
  Synthetic oligonucleotide; CTT chr2 60460143 60460164 60460148 60460143 -
tatgttctcaccgtttgaatgc

SEQ ID NO: 226023 - DNA, 22 bp, Artificial Sequence
  Synthetic oligonucleotide; TTT chr2 60460142 60460163 60460147 60460142 -
atgttctcaccgtttgaatgca

SEQ ID NO: 226024 - DNA, 22 bp, Artificial Sequence
  Synthetic oligonucleotide; TTA chr2 60460141 60460162 60460146 60460141 -
tgttctcaccgtttgaatgcat

SEQ ID NO: 226025 - DNA, 22 bp, Artificial Sequence
  Synthetic oligonucleotide; TTC chr2 60460136 60460157 60460141 60460136 -
tcaccgtttgaatgcatgatct

SEQ ID NO: 226026 - DNA, 22 bp, Artificial Sequence
  Synthetic oligonucleotide; CTC chr2 60460134 60460155 60460139 60460134 -
accgtttgaatgcatgatctgt

SEQ ID NO: 226027 - DNA, 22 bp, Artificial Sequence
  Synthetic oligonucleotide; TTT chr2 60460127 60460148 60460132 60460127 -
gaatgcatgatctgtatggggc

SEQ ID NO: 226028 - DNA, 22 bp, Artificial Sequence
  Synthetic oligonucleotide; TTG chr2 60460126 60460147 60460131 60460126 -
aatgcatgatctgtatggggca

SEQ ID NO: 226029 - DNA, 22 bp, Artificial Sequence
  Synthetic oligonucleotide; CTG chr2 60460113 60460134 60460118 60460113 -
tatggggcaatactattgcatt

SEQ ID NO: 226030 - DNA, 22 bp, Artificial Sequence
  Synthetic oligonucleotide; CTA chr2 60460098 60460119 60460103 60460098 -
ttgcattttacgcaaactttga

SEQ ID NO: 226031 - DNA, 22 bp, Artificial Sequence
  Synthetic oligonucleotide; TTG chr2 60460095 60460116 60460100 60460095 -
cattttacgcaaactttgagcc

SEQ ID NO: 226032 - DNA, 22 bp, Artificial Sequence
  Synthetic oligonucleotide; TTT chr2 60460090 60460111 60460095 60460090 -
tacgcaaactttgagcctttct

SEQ ID NO: 226033 - DNA, 22 bp, Artificial Sequence
  Synthetic oligonucleotide; TTT chr2 60460089 60460110 60460094 60460089 -
acgcaaactttgagcctttctc

SEQ ID NO: 226034 - DNA, 22 bp, Artificial Sequence
  Synthetic oligonucleotide; TTA chr2 60460088 60460109 60460093 60460088 -
cgcaaactttgagcctttctct

SEQ ID NO: 226035 - DNA, 22 bp, Artificial Sequence
  Synthetic oligonucleotide; CTT chr2 60460079 60460100 60460084 60460079 -
tgagcctttctcttgtgcaata

SEQ ID NO: 226036 - DNA, 22 bp, Artificial Sequence
  Synthetic oligonucleotide; TTT chr2 60460078 60460099 60460083 60460078 -
gagcctttctcttgtgcaataa

SEQ ID NO: 226037 - DNA, 22 bp, Artificial Sequence
  Synthetic oligonucleotide; TTG chr2 60460077 60460098 60460082 60460077 -
agcctttctcttgtgcaataat

SEQ ID NO: 226038 - DNA, 22 bp, Artificial Sequence
  Synthetic oligonucleotide; CTT chr2 60460071 60460092 60460076 60460071 -
tctcttgtgcaataatttacat

SEQ ID NO: 226039 - DNA, 22 bp, Artificial Sequence
  Synthetic oligonucleotide; TTT chr2 60460070 60460091 60460075 60460070 -
ctcttgtgcaataatttacatg

SEQ ID NO: 226040 - DNA, 22 bp, Artificial Sequence
  Synthetic oligonucleotide; TTC chr2 60460069 60460090 60460074 60460069 -
tcttgtgcaataatttacatgt

SEQ ID NO: 226041 - DNA, 22 bp, Artificial Sequence
  Synthetic oligonucleotide; CTC chr2 60460067 60460088 60460072 60460067 -
ttgtgcaataatttacatgttg

SEQ ID NO: 226042 - DNA, 22 bp, Artificial Sequence
  Synthetic oligonucleotide; CTT chr2 60460065 60460086 60460070 60460065 -
gtgcaataatttacatgttgtg

SEQ ID NO: 226043 - DNA, 22 bp, Artificial Sequence
  Synthetic oligonucleotide; TTG chr2 60460064 60460085 60460069 60460064 -
tgcaataatttacatgttgtgt

SEQ ID NO: 226044 - DNA, 22 bp, Artificial Sequence
  Synthetic oligonucleotide; TTT chr2 60460053 60460074 60460058 60460053 -
acatgttgtgtatgtttttttt

SEQ ID NO: 226045 - DNA, 22 bp, Artificial Sequence
  Synthetic oligonucleotide; TTA chr2 60460052 60460073 60460057 60460052 -
catgttgtgtatgttttttttt

SEQ ID NO: 226046 - DNA, 22 bp, Artificial Sequence
  Synthetic oligonucleotide; TTG chr2 60460045 60460066 60460050 60460045 -
tgtatgtttttttttaaactta

SEQ ID NO: 226047 - DNA, 22 bp, Artificial Sequence
  Synthetic oligonucleotide; TTT chr2 60460036 60460057 60460041 60460036 -
ttttttaaacttagacagcatg

SEQ ID NO: 226048 - DNA, 22 bp, Artificial Sequence
  Synthetic oligonucleotide; TTT chr2 60460035 60460056 60460040 60460035 -
tttttaaacttagacagcatgt

SEQ ID NO: 226049 - DNA, 22 bp, Artificial Sequence
  Synthetic oligonucleotide; TTT chr2 60460034 60460055 60460039 60460034 -
ttttaaacttagacagcatgta

SEQ ID NO: 226050 - DNA, 22 bp, Artificial Sequence
  Synthetic oligonucleotide; TTT chr2 60460033 60460054 60460038 60460033 -
tttaaacttagacagcatgtat

SEQ ID NO: 226051 - DNA, 22 bp, Artificial Sequence
  Synthetic oligonucleotide; TTT chr2 60460032 60460053 60460037 60460032 -
ttaaacttagacagcatgtatg

SEQ ID NO: 226052 - DNA, 22 bp, Artificial Sequence
  Synthetic oligonucleotide; TTT chr2 60460031 60460052 60460036 60460031 -
taaacttagacagcatgtatgg

SEQ ID NO: 226053 - DNA, 22 bp, Artificial Sequence
  Synthetic oligonucleotide; TTT chr2 60460030 60460051 60460035 60460030 -
aaacttagacagcatgtatggt

SEQ ID NO: 226054 - DNA, 22 bp, Artificial Sequence
  Synthetic oligonucleotide; TTA chr2 60460029 60460050 60460034 60460029 -
aacttagacagcatgtatggta

SEQ ID NO: 226055 - DNA, 22 bp, Artificial Sequence
  Synthetic oligonucleotide; CTT chr2 60460024 60460045 60460029 60460024 -
agacagcatgtatggtatgtta

SEQ ID NO: 226056 - DNA, 22 bp, Artificial Sequence
  Synthetic oligonucleotide; TTA chr2 60460023 60460044 60460028 60460023 -
gacagcatgtatggtatgttat

SEQ ID NO: 226057 - DNA, 22 bp, Artificial Sequence
  Synthetic oligonucleotide; TTA chr2 60460002 60460023 60460007 60460002 -
tggctattttaaattgtcccta

SEQ ID NO: 226058 - DNA, 22 bp, Artificial Sequence
  Synthetic oligonucleotide; CTA chr2 60459996 60460017 60460001 60459996 -
ttttaaattgtccctaattcgt

SEQ ID NO: 226059 - DNA, 22 bp, Artificial Sequence
  Synthetic oligonucleotide; TTT chr2 60459993 60460014 60459998 60459993 -
taaattgtccctaattcgttgc

SEQ ID NO: 226060 - DNA, 22 bp, Artificial Sequence
  Synthetic oligonucleotide; TTT chr2 60459992 60460013 60459997 60459992 -
aaattgtccctaattcgttgct

SEQ ID NO: 226061 - DNA, 22 bp, Artificial Sequence
  Synthetic oligonucleotide; TTA chr2 60459991 60460012 60459996 60459991 -
aattgtccctaattcgttgctg

SEQ ID NO: 226062 - DNA, 22 bp, Artificial Sequence
  Synthetic oligonucleotide; TTG chr2 60459986 60460007 60459991 60459986 -
tccctaattcgttgctgagcaa

SEQ ID NO: 226063 - DNA, 22 bp, Artificial Sequence
  Synthetic oligonucleotide; CTA chr2 60459980 60460001 60459985 60459980 -
attcgttgctgagcaaacatgt

SEQ ID NO: 226064 - DNA, 22 bp, Artificial Sequence
  Synthetic oligonucleotide; TTC chr2 60459976 60459997 60459981 60459976 -
gttgctgagcaaacatgttgct

SEQ ID NO: 226065 - DNA, 22 bp, Artificial Sequence
  Synthetic oligonucleotide; TTG chr2 60459972 60459993 60459977 60459972 -
ctgagcaaacatgttgctgttt

SEQ ID NO: 226066 - DNA, 22 bp, Artificial Sequence
  Synthetic oligonucleotide; CTG chr2 60459969 60459990 60459974 60459969 -
agcaaacatgttgctgtttcca

SEQ ID NO: 226067 - DNA, 22 bp, Artificial Sequence
  Synthetic oligonucleotide; TTG chr2 60459956 60459977 60459961 60459956 -
ctgtttccagttccgttctgag

SEQ ID NO: 226068 - DNA, 22 bp, Artificial Sequence
  Synthetic oligonucleotide; CTG chr2 60459953 60459974 60459958 60459953 -
tttccagttccgttctgagaga

SEQ ID NO: 226069 - DNA, 22 bp, Artificial Sequence
  Synthetic oligonucleotide; TTT chr2 60459950 60459971 60459955 60459950 -
ccagttccgttctgagagaaaa

SEQ ID NO: 226070 - DNA, 22 bp, Artificial Sequence
  Synthetic oligonucleotide; TTC chr2 60459949 60459970 60459954 60459949 -
cagttccgttctgagagaaaaa

SEQ ID NO: 226071 - DNA, 22 bp, Artificial Sequence
  Synthetic oligonucleotide; TTC chr2 60459943 60459964 60459948 60459943 -
cgttctgagagaaaaagagaga

SEQ ID NO: 226072 - DNA, 22 bp, Artificial Sequence
  Synthetic oligonucleotide; TTC chr2 60459938 60459959 60459943 60459938 -
tgagagaaaaagagagagagag

SEQ ID NO: 226073 - DNA, 22 bp, Artificial Sequence
  Synthetic oligonucleotide; CTG chr2 60459936 60459957 60459941 60459936 -
agagaaaaagagagagagagag

SEQ ID NO: 226074 - DNA, 22 bp, Artificial Sequence
  Synthetic oligonucleotide; CTG chr2 60459899 60459920 60459904 60459899 -
catacattctgtaatacatatc

SEQ ID NO: 226075 - DNA, 22 bp, Artificial Sequence
  Synthetic oligonucleotide; TTC chr2 60459890 60459911 60459895 60459890 -
tgtaatacatatcatgtacagt

SEQ ID NO: 226076 - DNA, 22 bp, Artificial Sequence
  Synthetic oligonucleotide; CTG chr2 60459888 60459909 60459893 60459888 -
taatacatatcatgtacagttt

SEQ ID NO: 226077 - DNA, 22 bp, Artificial Sequence
  Synthetic oligonucleotide; TTT chr2 60459866 60459887 60459871 60459866 -
tattttataacgtgaggaggaa

SEQ ID NO: 226078 - DNA, 22 bp, Artificial Sequence
  Synthetic oligonucleotide; TTT chr2 60459865 60459886 60459870 60459865 -
attttataacgtgaggaggaaa

SEQ ID NO: 226079 - DNA, 22 bp, Artificial Sequence
  Synthetic oligonucleotide; TTA chr2 60459864 60459885 60459869 60459864 -
ttttataacgtgaggaggaaaa

SEQ ID NO: 226080 - DNA, 22 bp, Artificial Sequence
  Synthetic oligonucleotide; TTT chr2 60459861 60459882 60459866 60459861 -
tataacgtgaggaggaaaaaca

SEQ ID NO: 226081 - DNA, 22 bp, Artificial Sequence
  Synthetic oligonucleotide; TTT chr2 60459860 60459881 60459865 60459860 -
ataacgtgaggaggaaaaacag

SEQ ID NO: 226082 - DNA, 22 bp, Artificial Sequence
  Synthetic oligonucleotide; TTA chr2 60459859 60459880 60459864 60459859 -
taacgtgaggaggaaaaacagt

SEQ ID NO: 226083 - DNA, 22 bp, Artificial Sequence
  Synthetic oligonucleotide; CTT chr2 60459834 60459855 60459839 60459834 -
tggattaaccctctatagacag

SEQ ID NO: 226084 - DNA, 22 bp, Artificial Sequence
  Synthetic oligonucleotide; TTT chr2 60459833 60459854 60459838 60459833 -
ggattaaccctctatagacaga

SEQ ID NO: 226085 - DNA, 22 bp, Artificial Sequence
  Synthetic oligonucleotide; TTG chr2 60459832 60459853 60459837 60459832 -
gattaaccctctatagacagaa

SEQ ID NO: 226086 - DNA, 22 bp, Artificial Sequence
  Synthetic oligonucleotide; TTA chr2 60459827 60459848 60459832 60459827 -
accctctatagacagaatagat

SEQ ID NO: 226087 - DNA, 22 bp, Artificial Sequence
  Synthetic oligonucleotide; CTC chr2 60459821 60459842 60459826 60459821 -
tatagacagaatagatagcact

SEQ ID NO: 226088 - DNA, 22 bp, Artificial Sequence
  Synthetic oligonucleotide; CTA chr2 60459819 60459840 60459824 60459819 -
tagacagaatagatagcactga

SEQ ID NO: 226089 - DNA, 22 bp, Artificial Sequence
  Synthetic oligonucleotide; CTG chr2 60459798 60459819 60459803 60459798 -
aaaaaaaatctctatgagctaa

SEQ ID NO: 226090 - DNA, 22 bp, Artificial Sequence
  Synthetic oligonucleotide; CTC chr2 60459786 60459807 60459791 60459786 -
tatgagctaaatgtctgtctct

SEQ ID NO: 226091 - DNA, 22 bp, Artificial Sequence
  Synthetic oligonucleotide; CTA chr2 60459784 60459805 60459789 60459784 -
tgagctaaatgtctgtctctaa

SEQ ID NO: 226092 - DNA, 22 bp, Artificial Sequence
  Synthetic oligonucleotide; CTA chr2 60459777 60459798 60459782 60459777 -
aatgtctgtctctaaagggtta

SEQ ID NO: 226093 - DNA, 22 bp, Artificial Sequence
  Synthetic oligonucleotide; CTG chr2 60459769 60459790 60459774 60459769 -
tctctaaagggttaaatgtatc

SEQ ID NO: 226094 - DNA, 22 bp, Artificial Sequence
  Synthetic oligonucleotide; CTC chr2 60459765 60459786 60459770 60459765 -
taaagggttaaatgtatcaatt

SEQ ID NO: 226095 - DNA, 22 bp, Artificial Sequence
  Synthetic oligonucleotide; CTA chr2 60459763 60459784 60459768 60459763 -
aagggttaaatgtatcaattgg

SEQ ID NO: 226096 - DNA, 22 bp, Artificial Sequence
  Synthetic oligonucleotide; TTA chr2 60459755 60459776 60459760 60459755 -
aatgtatcaattggaaaggaag

SEQ ID NO: 226097 - DNA, 22 bp, Artificial Sequence
  Synthetic oligonucleotide; TTG chr2 60459742 60459763 60459747 60459742 -
gaaaggaagaaaaaaggccttg

SEQ ID NO: 226098 - DNA, 22 bp, Artificial Sequence
  Synthetic oligonucleotide; CTT chr2 60459721 60459742 60459726 60459721 -
gaattgacaaattaacagaaaa

SEQ ID NO: 226099 - DNA, 22 bp, Artificial Sequence
  Synthetic oligonucleotide; TTG chr2 60459720 60459741 60459725 60459720 -
aattgacaaattaacagaaaaa

SEQ ID NO: 226100 - DNA, 22 bp, Artificial Sequence
  Synthetic oligonucleotide; TTG chr2 60459715 60459736 60459720 60459715 -
acaaattaacagaaaaacagaa

SEQ ID NO: 226101 - DNA, 22 bp, Artificial Sequence
  Synthetic oligonucleotide; TTA chr2 60459707 60459728 60459712 60459707 -
acagaaaaacagaacaagttta

SEQ ID NO: 226102 - DNA, 22 bp, Artificial Sequence
  Synthetic oligonucleotide; TTT chr2 60459686 60459707 60459691 60459686 -
attctatcatttggttttaaaa

SEQ ID NO: 226103 - DNA, 22 bp, Artificial Sequence
  Synthetic oligonucleotide; TTA chr2 60459685 60459706 60459690 60459685 -
ttctatcatttggttttaaaat

SEQ ID NO: 226104 - DNA, 22 bp, Artificial Sequence
  Synthetic oligonucleotide; TTC chr2 60459682 60459703 60459687 60459682 -
tatcatttggttttaaaatatg

SEQ ID NO: 226105 - DNA, 22 bp, Artificial Sequence
  Synthetic oligonucleotide; CTA chr2 60459680 60459701 60459685 60459680 -
tcatttggttttaaaatatgag

SEQ ID NO: 226106 - DNA, 22 bp, Artificial Sequence
  Synthetic oligonucleotide; TTT chr2 60459674 60459695 60459679 60459674 -
ggttttaaaatatgagtgcctt

SEQ ID NO: 226107 - DNA, 22 bp, Artificial Sequence
  Synthetic oligonucleotide; TTG chr2 60459673 60459694 60459678 60459673 -
gttttaaaatatgagtgccttg

SEQ ID NO: 226108 - DNA, 22 bp, Artificial Sequence
  Synthetic oligonucleotide; TTT chr2 60459669 60459690 60459674 60459669 -
taaaatatgagtgccttggatc

SEQ ID NO: 226109 - DNA, 22 bp, Artificial Sequence
  Synthetic oligonucleotide; TTT chr2 60459668 60459689 60459673 60459668 -
aaaatatgagtgccttggatct

SEQ ID NO: 226110 - DNA, 22 bp, Artificial Sequence
  Synthetic oligonucleotide; TTA chr2 60459667 60459688 60459672 60459667 -
aaatatgagtgccttggatcta

SEQ ID NO: 226111 - DNA, 22 bp, Artificial Sequence
  Synthetic oligonucleotide; CTT chr2 60459652 60459673 60459657 60459652 -
ggatctattaaaaccacatcga

SEQ ID NO: 226112 - DNA, 22 bp, Artificial Sequence
  Synthetic oligonucleotide; TTG chr2 60459651 60459672 60459656 60459651 -
gatctattaaaaccacatcgat

SEQ ID NO: 226113 - DNA, 22 bp, Artificial Sequence
  Synthetic oligonucleotide; CTA chr2 60459645 60459666 60459650 60459645 -
ttaaaaccacatcgatggttct

SEQ ID NO: 226114 - DNA, 22 bp, Artificial Sequence
  Synthetic oligonucleotide; TTA chr2 60459642 60459663 60459647 60459642 -
aaaccacatcgatggttctttc

SEQ ID NO: 226115 - DNA, 22 bp, Artificial Sequence
  Synthetic oligonucleotide; TTC chr2 60459624 60459645 60459629 60459624 -
tttctacttgttataaacttgt

SEQ ID NO: 226116 - DNA, 22 bp, Artificial Sequence
  Synthetic oligonucleotide; CTT chr2 60459622 60459643 60459627 60459622 -
tctacttgttataaacttgtag

SEQ ID NO: 226117 - DNA, 22 bp, Artificial Sequence
  Synthetic oligonucleotide; TTT chr2 60459621 60459642 60459626 60459621 -
ctacttgttataaacttgtagc

SEQ ID NO: 226118 - DNA, 22 bp, Artificial Sequence
  Synthetic oligonucleotide; TTC chr2 60459620 60459641 60459625 60459620 -
tacttgttataaacttgtagct

SEQ ID NO: 226119 - DNA, 22 bp, Artificial Sequence
  Synthetic oligonucleotide; CTA chr2 60459618 60459639 60459623 60459618 -
cttgttataaacttgtagctta

SEQ ID NO: 226120 - DNA, 22 bp, Artificial Sequence
  Synthetic oligonucleotide; CTT chr2 60459615 60459636 60459620 60459615 -
gttataaacttgtagcttaatt

SEQ ID NO: 226121 - DNA, 22 bp, Artificial Sequence
  Synthetic oligonucleotide; TTG chr2 60459614 60459635 60459619 60459614 -
ttataaacttgtagcttaattc

SEQ ID NO: 226122 - DNA, 22 bp, Artificial Sequence
  Synthetic oligonucleotide; TTA chr2 60459611 60459632 60459616 60459611 -
taaacttgtagcttaattcagc

SEQ ID NO: 226123 - DNA, 22 bp, Artificial Sequence
  Synthetic oligonucleotide; CTT chr2 60459604 60459625 60459609 60459604 -
gtagcttaattcagcattgggt

SEQ ID NO: 226124 - DNA, 22 bp, Artificial Sequence
  Synthetic oligonucleotide; TTG chr2 60459603 60459624 60459608 60459603 -
tagcttaattcagcattgggtg

SEQ ID NO: 226125 - DNA, 22 bp, Artificial Sequence
  Synthetic oligonucleotide; CTT chr2 60459597 60459618 60459602 60459597 -
aattcagcattgggtgaggtaa

SEQ ID NO: 226126 - DNA, 22 bp, Artificial Sequence
  Synthetic oligonucleotide; TTA chr2 60459596 60459617 60459601 60459596 -
attcagcattgggtgaggtaat

SEQ ID NO: 226127 - DNA, 22 bp, Artificial Sequence
  Synthetic oligonucleotide; TTC chr2 60459592 60459613 60459597 60459592 -
agcattgggtgaggtaataaac

SEQ ID NO: 226128 - DNA, 22 bp, Artificial Sequence
  Synthetic oligonucleotide; TTG chr2 60459585 60459606 60459590 60459585 -
ggtgaggtaataaaccttagga

SEQ ID NO: 226129 - DNA, 22 bp, Artificial Sequence
  Synthetic oligonucleotide; CTT chr2 60459567 60459588 60459572 60459567 -
aggaactagcatataattctat

SEQ ID NO: 226130 - DNA, 22 bp, Artificial Sequence
  Synthetic oligonucleotide; TTA chr2 60459566 60459587 60459571 60459566 -
ggaactagcatataattctata

SEQ ID NO: 226131 - DNA, 22 bp, Artificial Sequence
  Synthetic oligonucleotide; CTA chr2 60459559 60459580 60459564 60459559 -
gcatataattctatattgtatt

SEQ ID NO: 226132 - DNA, 22 bp, Artificial Sequence
  Synthetic oligonucleotide; TTC chr2 60459548 60459569 60459553 60459548 -
tatattgtatttctcacaacaa

SEQ ID NO: 226133 - DNA, 22 bp, Artificial Sequence
  Synthetic oligonucleotide; CTA chr2 60459546 60459567 60459551 60459546 -
tattgtatttctcacaacaatg

SEQ ID NO: 226134 - DNA, 22 bp, Artificial Sequence
  Synthetic oligonucleotide; TTG chr2 60459541 60459562 60459546 60459541 -
tatttctcacaacaatggctac

SEQ ID NO: 226135 - DNA, 22 bp, Artificial Sequence
  Synthetic oligonucleotide; TTT chr2 60459536 60459557 60459541 60459536 -
ctcacaacaatggctacctaaa

SEQ ID NO: 226136 - DNA, 22 bp, Artificial Sequence
  Synthetic oligonucleotide; TTC chr2 60459535 60459556 60459540 60459535 -
tcacaacaatggctacctaaaa

SEQ ID NO: 226137 - DNA, 22 bp, Artificial Sequence
  Synthetic oligonucleotide; CTC chr2 60459533 60459554 60459538 60459533 -
acaacaatggctacctaaaaag

SEQ ID NO: 226138 - DNA, 22 bp, Artificial Sequence
  Synthetic oligonucleotide; CTA chr2 60459520 60459541 60459525 60459520 -
cctaaaaagatgacccattatg

SEQ ID NO: 226139 - DNA, 22 bp, Artificial Sequence
  Synthetic oligonucleotide; CTA chr2 60459516 60459537 60459521 60459516 -
aaaagatgacccattatgtcct

SEQ ID NO: 226140 - DNA, 22 bp, Artificial Sequence
  Synthetic oligonucleotide; TTA chr2 60459500 60459521 60459505 60459500 -
tgtcctagttaatcatcatttt

SEQ ID NO: 226141 - DNA, 22 bp, Artificial Sequence
  Synthetic oligonucleotide; CTA chr2 60459493 60459514 60459498 60459493 -
gttaatcatcatttttccttta

SEQ ID NO: 226142 - DNA, 22 bp, Artificial Sequence
  Synthetic oligonucleotide; TTA chr2 60459489 60459510 60459494 60459489 -
atcatcatttttcctttagttt

SEQ ID NO: 226143 - DNA, 22 bp, Artificial Sequence
  Synthetic oligonucleotide; TTT chr2 60459479 60459500 60459484 60459479 -
ttcctttagtttaattttataa

SEQ ID NO: 226144 - DNA, 22 bp, Artificial Sequence
  Synthetic oligonucleotide; TTT chr2 60459478 60459499 60459483 60459478 -
tcctttagtttaattttataaa

SEQ ID NO: 226145 - DNA, 22 bp, Artificial Sequence
  Synthetic oligonucleotide; TTT chr2 60459477 60459498 60459482 60459477 -
cctttagtttaattttataaac

SEQ ID NO: 226146 - DNA, 22 bp, Artificial Sequence
  Synthetic oligonucleotide; TTC chr2 60459476 60459497 60459481 60459476 -
ctttagtttaattttataaaca

SEQ ID NO: 226147 - DNA, 22 bp, Artificial Sequence
  Synthetic oligonucleotide; CTT chr2 60459473 60459494 60459478 60459473 -
tagtttaattttataaacaaaa

SEQ ID NO: 226148 - DNA, 22 bp, Artificial Sequence
  Synthetic oligonucleotide; TTT chr2 60459472 60459493 60459477 60459472 -
agtttaattttataaacaaaac

SEQ ID NO: 226149 - DNA, 22 bp, Artificial Sequence
  Synthetic oligonucleotide; TTA chr2 60459471 60459492 60459476 60459471 -
gtttaattttataaacaaaact

SEQ ID NO: 226150 - DNA, 22 bp, Artificial Sequence
  Synthetic oligonucleotide; TTT chr2 60459467 60459488 60459472 60459467 -
aattttataaacaaaactgatt

SEQ ID NO: 226151 - DNA, 22 bp, Artificial Sequence
  Synthetic oligonucleotide; TTA chr2 60459466 60459487 60459471 60459466 -
attttataaacaaaactgatta

SEQ ID NO: 226152 - DNA, 22 bp, Artificial Sequence
  Synthetic oligonucleotide; TTT chr2 60459462 60459483 60459467 60459462 -
tataaacaaaactgattatacc

SEQ ID NO: 226153 - DNA, 22 bp, Artificial Sequence
  Synthetic oligonucleotide; TTT chr2 60459461 60459482 60459466 60459461 -
ataaacaaaactgattatacca

SEQ ID NO: 226154 - DNA, 22 bp, Artificial Sequence
  Synthetic oligonucleotide; TTA chr2 60459460 60459481 60459465 60459460 -
taaacaaaactgattataccag

SEQ ID NO: 226155 - DNA, 22 bp, Artificial Sequence
  Synthetic oligonucleotide; CTG chr2 60459448 60459469 60459453 60459448 -
attataccagtataaaagctac

SEQ ID NO: 226156 - DNA, 22 bp, Artificial Sequence
  Synthetic oligonucleotide; TTA chr2 60459444 60459465 60459449 60459444 -
taccagtataaaagctactttg

SEQ ID NO: 226157 - DNA, 22 bp, Artificial Sequence
  Synthetic oligonucleotide; CTA chr2 60459427 60459448 60459432 60459427 -
ctttgctcctggtgagagctta

SEQ ID NO: 226158 - DNA, 22 bp, Artificial Sequence
  Synthetic oligonucleotide; CTT chr2 60459424 60459445 60459429 60459424 -
tgctcctggtgagagcttaaaa

SEQ ID NO: 226159 - DNA, 22 bp, Artificial Sequence
  Synthetic oligonucleotide; TTT chr2 60459423 60459444 60459428 60459423 -
gctcctggtgagagcttaaaag

SEQ ID NO: 226160 - DNA, 22 bp, Artificial Sequence
  Synthetic oligonucleotide; TTG chr2 60459422 60459443 60459427 60459422 -
ctcctggtgagagcttaaaaga

SEQ ID NO: 226161 - DNA, 22 bp, Artificial Sequence
  Synthetic oligonucleotide; CTC chr2 60459419 60459440 60459424 60459419 -
ctggtgagagcttaaaagaaat

SEQ ID NO: 226162 - DNA, 22 bp, Artificial Sequence
  Synthetic oligonucleotide; CTG chr2 60459416 60459437 60459421 60459416 -
gtgagagcttaaaagaaatggg

SEQ ID NO: 226163 - DNA, 22 bp, Artificial Sequence
  Synthetic oligonucleotide; CTT chr2 60459406 60459427 60459411 60459406 -
aaaagaaatgggctgttttgcc

SEQ ID NO: 226164 - DNA, 22 bp, Artificial Sequence
  Synthetic oligonucleotide; TTA chr2 60459405 60459426 60459410 60459405 -
aaagaaatgggctgttttgccc

SEQ ID NO: 226165 - DNA, 22 bp, Artificial Sequence
  Synthetic oligonucleotide; CTG chr2 60459391 60459412 60459396 60459391 -
ttttgcccaaagttttattttt

SEQ ID NO: 226166 - DNA, 22 bp, Artificial Sequence
  Synthetic oligonucleotide; TTT chr2 60459388 60459409 60459393 60459388 -
tgcccaaagttttatttttttt

SEQ ID NO: 226167 - DNA, 22 bp, Artificial Sequence
  Synthetic oligonucleotide; TTT chr2 60459387 60459408 60459392 60459387 -
gcccaaagttttatttttttta

SEQ ID NO: 226168 - DNA, 22 bp, Artificial Sequence
  Synthetic oligonucleotide; TTG chr2 60459386 60459407 60459391 60459386 -
cccaaagttttattttttttaa

SEQ ID NO: 226169 - DNA, 22 bp, Artificial Sequence
  Synthetic oligonucleotide; TTT chr2 60459376 60459397 60459381 60459376 -
tattttttttaaacaatgatta

SEQ ID NO: 226170 - DNA, 22 bp, Artificial Sequence
  Synthetic oligonucleotide; TTT chr2 60459375 60459396 60459380 60459375 -
attttttttaaacaatgattaa

SEQ ID NO: 226171 - DNA, 22 bp, Artificial Sequence
  Synthetic oligonucleotide; TTA chr2 60459374 60459395 60459379 60459374 -
ttttttttaaacaatgattaaa

SEQ ID NO: 226172 - DNA, 22 bp, Artificial Sequence
  Synthetic oligonucleotide; TTT chr2 60459371 60459392 60459376 60459371 -
tttttaaacaatgattaaattg

SEQ ID NO: 226173 - DNA, 22 bp, Artificial Sequence
  Synthetic oligonucleotide; TTT chr2 60459370 60459391 60459375 60459370 -
ttttaaacaatgattaaattga

SEQ ID NO: 226174 - DNA, 22 bp, Artificial Sequence
  Synthetic oligonucleotide; TTT chr2 60459369 60459390 60459374 60459369 -
tttaaacaatgattaaattgaa

SEQ ID NO: 226175 - DNA, 22 bp, Artificial Sequence
  Synthetic oligonucleotide; TTT chr2 60459368 60459389 60459373 60459368 -
ttaaacaatgattaaattgaat

SEQ ID NO: 226176 - DNA, 22 bp, Artificial Sequence
  Synthetic oligonucleotide; TTT chr2 60459367 60459388 60459372 60459367 -
taaacaatgattaaattgaatg

SEQ ID NO: 226177 - DNA, 22 bp, Artificial Sequence
  Synthetic oligonucleotide; TTT chr2 60459366 60459387 60459371 60459366 -
aaacaatgattaaattgaatgt

SEQ ID NO: 226178 - DNA, 22 bp, Artificial Sequence
  Synthetic oligonucleotide; TTA chr2 60459365 60459386 60459370 60459365 -
aacaatgattaaattgaatgtg

SEQ ID NO: 226179 - DNA, 22 bp, Artificial Sequence
  Synthetic oligonucleotide; TTA chr2 60459354 60459375 60459359 60459354 -
aattgaatgtgtaatgtgcaaa

SEQ ID NO: 226180 - DNA, 22 bp, Artificial Sequence
  Synthetic oligonucleotide; TTG chr2 60459349 60459370 60459354 60459349 -
aatgtgtaatgtgcaaaagccc

SEQ ID NO: 226181 - DNA, 22 bp, Artificial Sequence
  Synthetic oligonucleotide; CTG chr2 60459325 60459346 60459330 60459325 -
gaacgcaattaaatacactagt

SEQ ID NO: 226182 - DNA, 22 bp, Artificial Sequence
  Synthetic oligonucleotide; TTA chr2 60459314 60459335 60459319 60459314 -
aatacactagtaaggagttcat

SEQ ID NO: 226183 - DNA, 22 bp, Artificial Sequence
  Synthetic oligonucleotide; CTA chr2 60459305 60459326 60459310 60459305 -
gtaaggagttcattttatgaag

SEQ ID NO: 226184 - DNA, 22 bp, Artificial Sequence
  Synthetic oligonucleotide; TTC chr2 60459294 60459315 60459299 60459294 -
attttatgaagatatttgcttt

SEQ ID NO: 226185 - DNA, 22 bp, Artificial Sequence
  Synthetic oligonucleotide; TTT chr2 60459290 60459311 60459295 60459290 -
tatgaagatatttgctttaata

SEQ ID NO: 226186 - DNA, 22 bp, Artificial Sequence
  Synthetic oligonucleotide; TTT chr2 60459289 60459310 60459294 60459289 -
atgaagatatttgctttaataa

SEQ ID NO: 226187 - DNA, 22 bp, Artificial Sequence
  Synthetic oligonucleotide; TTA chr2 60459288 60459309 60459293 60459288 -
tgaagatatttgctttaataat

SEQ ID NO: 226188 - DNA, 22 bp, Artificial Sequence
  Synthetic oligonucleotide; TTT chr2 60459277 60459298 60459282 60459277 -
gctttaataatgtctttttaaa

SEQ ID NO: 226189 - DNA, 22 bp, Artificial Sequence
  Synthetic oligonucleotide; TTG chr2 60459276 60459297 60459281 60459276 -
ctttaataatgtctttttaaaa

SEQ ID NO: 226190 - DNA, 22 bp, Artificial Sequence
  Synthetic oligonucleotide; CTT chr2 60459273 60459294 60459278 60459273 -
taataatgtctttttaaaaata

SEQ ID NO: 226191 - DNA, 22 bp, Artificial Sequence
  Synthetic oligonucleotide; TTT chr2 60459272 60459293 60459277 60459272 -
aataatgtctttttaaaaatac

SEQ ID NO: 226192 - DNA, 22 bp, Artificial Sequence
  Synthetic oligonucleotide; TTA chr2 60459271 60459292 60459276 60459271 -
ataatgtctttttaaaaatact

SEQ ID NO: 226193 - DNA, 22 bp, Artificial Sequence
  Synthetic oligonucleotide; CTT chr2 60459261 60459282 60459266 60459261 -
tttaaaaatactggcaccaaaa

SEQ ID NO: 226194 - DNA, 22 bp, Artificial Sequence
  Synthetic oligonucleotide; TTT chr2 60459260 60459281 60459265 60459260 -
ttaaaaatactggcaccaaaag

SEQ ID NO: 226195 - DNA, 22 bp, Artificial Sequence
  Synthetic oligonucleotide; TTT chr2 60459259 60459280 60459264 60459259 -
taaaaatactggcaccaaaaga

SEQ ID NO: 226196 - DNA, 22 bp, Artificial Sequence
  Synthetic oligonucleotide; TTT chr2 60459258 60459279 60459263 60459258 -
aaaaatactggcaccaaaagaa

SEQ ID NO: 226197 - DNA, 22 bp, Artificial Sequence
  Synthetic oligonucleotide; TTA chr2 60459257 60459278 60459262 60459257 -
aaaatactggcaccaaaagaaa

SEQ ID NO: 226198 - DNA, 22 bp, Artificial Sequence
  Synthetic oligonucleotide; CTG chr2 60459248 60459269 60459253 60459248 -
gcaccaaaagaaatagatccag

SEQ ID NO: 226199 - DNA, 22 bp, Artificial Sequence
  Synthetic oligonucleotide; CTA chr2 60459221 60459242 60459226 60459221 -
cttggttgtcaagtggacaatc

SEQ ID NO: 226200 - DNA, 22 bp, Artificial Sequence
  Synthetic oligonucleotide; CTT chr2 60459218 60459239 60459223 60459218 -
ggttgtcaagtggacaatcaaa

SEQ ID NO: 226201 - DNA, 22 bp, Artificial Sequence
  Synthetic oligonucleotide; TTG chr2 60459217 60459238 60459222 60459217 -
gttgtcaagtggacaatcaaat

SEQ ID NO: 226202 - DNA, 22 bp, Artificial Sequence
  Synthetic oligonucleotide; TTG chr2 60459213 60459234 60459218 60459213 -
tcaagtggacaatcaaatgata

SEQ ID NO: 226203 - DNA, 22 bp, Artificial Sequence
  Synthetic oligonucleotide; CTT chr2 60459186 60459207 60459191 60459186 -
taagaccttgtataccatattg

SEQ ID NO: 226204 - DNA, 22 bp, Artificial Sequence
  Synthetic oligonucleotide; TTT chr2 60459185 60459206 60459190 60459185 -
aagaccttgtataccatattga

SEQ ID NO: 226205 - DNA, 22 bp, Artificial Sequence
  Synthetic oligonucleotide; TTA chr2 60459184 60459205 60459189 60459184 -
agaccttgtataccatattgaa

SEQ ID NO: 226206 - DNA, 22 bp, Artificial Sequence
  Synthetic oligonucleotide; CTT chr2 60459177 60459198 60459182 60459177 -
gtataccatattgaaaggaaga

SEQ ID NO: 226207 - DNA, 22 bp, Artificial Sequence
  Synthetic oligonucleotide; TTG chr2 60459176 60459197 60459181 60459176 -
tataccatattgaaaggaagag

SEQ ID NO: 226208 - DNA, 22 bp, Artificial Sequence
  Synthetic oligonucleotide; TTG chr2 60459164 60459185 60459169 60459164 -
aaaggaagaggctgacaataag

SEQ ID NO: 226209 - DNA, 22 bp, Artificial Sequence
  Synthetic oligonucleotide; CTG chr2 60459150 60459171 60459155 60459150 -
acaataaggtttgacagagggg

SEQ ID NO: 226210 - DNA, 22 bp, Artificial Sequence
  Synthetic oligonucleotide; TTT chr2 60459138 60459159 60459143 60459138 -
gacagaggggaacagaagaaaa

SEQ ID NO: 226211 - DNA, 22 bp, Artificial Sequence
  Synthetic oligonucleotide; TTG chr2 60459137 60459158 60459142 60459137 -
acagaggggaacagaagaaaat

SEQ ID NO: 226212 - DNA, 22 bp, Artificial Sequence
  Synthetic oligonucleotide; TTT chr2 60459105 60459126 60459110 60459105 -
attagcacaacgtggtactatt

SEQ ID NO: 226213 - DNA, 22 bp, Artificial Sequence
  Synthetic oligonucleotide; TTA chr2 60459104 60459125 60459109 60459104 -
ttagcacaacgtggtactattt

SEQ ID NO: 226214 - DNA, 22 bp, Artificial Sequence
  Synthetic oligonucleotide; TTA chr2 60459101 60459122 60459106 60459101 -
gcacaacgtggtactatttgcc

SEQ ID NO: 226215 - DNA, 22 bp, Artificial Sequence
  Synthetic oligonucleotide; CTA chr2 60459085 60459106 60459090 60459085 -
tttgccatttaaaactagaaca

SEQ ID NO: 226216 - DNA, 22 bp, Artificial Sequence
  Synthetic oligonucleotide; TTT chr2 60459082 60459103 60459087 60459082 -
gccatttaaaactagaacaggt

SEQ ID NO: 226217 - DNA, 22 bp, Artificial Sequence
  Synthetic oligonucleotide; TTG chr2 60459081 60459102 60459086 60459081 -
ccatttaaaactagaacaggta

SEQ ID NO: 226218 - DNA, 22 bp, Artificial Sequence
  Synthetic oligonucleotide; TTT chr2 60459075 60459096 60459080 60459075 -
aaaactagaacaggtatataag

SEQ ID NO: 226219 - DNA, 22 bp, Artificial Sequence
  Synthetic oligonucleotide; TTA chr2 60459074 60459095 60459079 60459074 -
aaactagaacaggtatataagc

SEQ ID NO: 226220 - DNA, 22 bp, Artificial Sequence
  Synthetic oligonucleotide; CTA chr2 60459068 60459089 60459073 60459068 -
gaacaggtatataagctaatat

SEQ ID NO: 226221 - DNA, 22 bp, Artificial Sequence
  Synthetic oligonucleotide; CTA chr2 60459050 60459071 60459055 60459050 -
atattgatacaatgatgattaa

SEQ ID NO: 226222 - DNA, 22 bp, Artificial Sequence
  Synthetic oligonucleotide; TTG chr2 60459044 60459065 60459049 60459044 -
atacaatgatgattaactatga

SEQ ID NO: 226223 - DNA, 22 bp, Artificial Sequence
  Synthetic oligonucleotide; TTA chr2 60459029 60459050 60459034 60459029 -
actatgaattcttaagacttgc

SEQ ID NO: 226224 - DNA, 22 bp, Artificial Sequence
  Synthetic oligonucleotide; CTA chr2 60459025 60459046 60459030 60459025 -
tgaattcttaagacttgcattt

SEQ ID NO: 226225 - DNA, 22 bp, Artificial Sequence
  Synthetic oligonucleotide; TTC chr2 60459018 60459039 60459023 60459018 -
ttaagacttgcatttaaatgtg

SEQ ID NO: 226226 - DNA, 22 bp, Artificial Sequence
  Synthetic oligonucleotide; CTT chr2 60459016 60459037 60459021 60459016 -
aagacttgcatttaaatgtgac

SEQ ID NO: 226227 - DNA, 22 bp, Artificial Sequence
  Synthetic oligonucleotide; TTA chr2 60459015 60459036 60459020 60459015 -
agacttgcatttaaatgtgaca

SEQ ID NO: 226228 - DNA, 22 bp, Artificial Sequence
  Synthetic oligonucleotide; CTT chr2 60459009 60459030 60459014 60459009 -
gcatttaaatgtgacattctta

SEQ ID NO: 226229 - DNA, 22 bp, Artificial Sequence
  Synthetic oligonucleotide; TTG chr2 60459008 60459029 60459013 60459008 -
catttaaatgtgacattcttaa

SEQ ID NO: 226230 - DNA, 22 bp, Artificial Sequence
  Synthetic oligonucleotide; TTT chr2 60459003 60459024 60459008 60459003 -
aaatgtgacattcttaaaaaaa

SEQ ID NO: 226231 - DNA, 22 bp, Artificial Sequence
  Synthetic oligonucleotide; TTA chr2 60459002 60459023 60459007 60459002 -
aatgtgacattcttaaaaaaag

SEQ ID NO: 226232 - DNA, 22 bp, Artificial Sequence
  Synthetic oligonucleotide; TTC chr2 60458990 60459011 60458995 60458990 -
ttaaaaaaagaagagaaagaat

SEQ ID NO: 226233 - DNA, 22 bp, Artificial Sequence
  Synthetic oligonucleotide; CTT chr2 60458988 60459009 60458993 60458988 -
aaaaaaagaagagaaagaattt

SEQ ID NO: 226234 - DNA, 22 bp, Artificial Sequence
  Synthetic oligonucleotide; TTA chr2 60458987 60459008 60458992 60458987 -
aaaaaagaagagaaagaatttt

SEQ ID NO: 226235 - DNA, 22 bp, Artificial Sequence
  Synthetic oligonucleotide; TTT chr2 60458966 60458987 60458971 60458966 -
taagagtagcagtatatatgtc

SEQ ID NO: 226236 - DNA, 22 bp, Artificial Sequence
  Synthetic oligonucleotide; TTT chr2 60458965 60458986 60458970 60458965 -
aagagtagcagtatatatgtct

SEQ ID NO: 226237 - DNA, 22 bp, Artificial Sequence
  Synthetic oligonucleotide; TTA chr2 60458964 60458985 60458969 60458964 -
agagtagcagtatatatgtctg

SEQ ID NO: 226238 - DNA, 22 bp, Artificial Sequence
  Synthetic oligonucleotide; CTG chr2 60458942 60458963 60458947 60458942 -
tgctccctaaaagttgtacttc

SEQ ID NO: 226239 - DNA, 22 bp, Artificial Sequence
  Synthetic oligonucleotide; CTC chr2 60458937 60458958 60458942 60458937 -
cctaaaagttgtacttcatttc

SEQ ID NO: 226240 - DNA, 22 bp, Artificial Sequence
  Synthetic oligonucleotide; CTA chr2 60458933 60458954 60458938 60458933 -
aaagttgtacttcatttctttt

SEQ ID NO: 226241 - DNA, 22 bp, Artificial Sequence
  Synthetic oligonucleotide; TTG chr2 60458926 60458947 60458931 60458926 -
tacttcatttcttttccataca

SEQ ID NO: 226242 - DNA, 22 bp, Artificial Sequence
  Synthetic oligonucleotide; CTT chr2 60458921 60458942 60458926 60458921 -
catttcttttccatacactgtg

SEQ ID NO: 226243 - DNA, 22 bp, Artificial Sequence
  Synthetic oligonucleotide; TTC chr2 60458920 60458941 60458925 60458920 -
atttcttttccatacactgtgt

SEQ ID NO: 226244 - DNA, 22 bp, Artificial Sequence
  Synthetic oligonucleotide; TTT chr2 60458916 60458937 60458921 60458916 -
cttttccatacactgtgtgcta

SEQ ID NO: 226245 - DNA, 22 bp, Artificial Sequence
  Synthetic oligonucleotide; TTC chr2 60458915 60458936 60458920 60458915 -
ttttccatacactgtgtgctat

SEQ ID NO: 226246 - DNA, 22 bp, Artificial Sequence
  Synthetic oligonucleotide; CTT chr2 60458913 60458934 60458918 60458913 -
ttccatacactgtgtgctattt

SEQ ID NO: 226247 - DNA, 22 bp, Artificial Sequence
  Synthetic oligonucleotide; TTT chr2 60458912 60458933 60458917 60458912 -
tccatacactgtgtgctatttg

SEQ ID NO: 226248 - DNA, 22 bp, Artificial Sequence
  Synthetic oligonucleotide; TTT chr2 60458911 60458932 60458916 60458911 -
ccatacactgtgtgctatttgt

SEQ ID NO: 226249 - DNA, 22 bp, Artificial Sequence
  Synthetic oligonucleotide; TTC chr2 60458910 60458931 60458915 60458910 -
catacactgtgtgctatttgtg

SEQ ID NO: 226250 - DNA, 22 bp, Artificial Sequence
  Synthetic oligonucleotide; CTG chr2 60458901 60458922 60458906 60458901 -
tgtgctatttgtgttaacatgg

SEQ ID NO: 226251 - DNA, 22 bp, Artificial Sequence
  Synthetic oligonucleotide; CTA chr2 60458894 60458915 60458899 60458894 -
tttgtgttaacatggaagagga

SEQ ID NO: 226252 - DNA, 22 bp, Artificial Sequence
  Synthetic oligonucleotide; TTT chr2 60458891 60458912 60458896 60458891 -
gtgttaacatggaagaggattc

SEQ ID NO: 226253 - DNA, 22 bp, Artificial Sequence
  Synthetic oligonucleotide; TTG chr2 60458890 60458911 60458895 60458890 -
tgttaacatggaagaggattca

SEQ ID NO: 226254 - DNA, 22 bp, Artificial Sequence
  Synthetic oligonucleotide; TTA chr2 60458885 60458906 60458890 60458885 -
acatggaagaggattcattgtt

SEQ ID NO: 226255 - DNA, 22 bp, Artificial Sequence
  Synthetic oligonucleotide; TTC chr2 60458869 60458890 60458874 60458869 -
attgtttttatttttatttttt

SEQ ID NO: 226256 - DNA, 22 bp, Artificial Sequence
  Synthetic oligonucleotide; TTG chr2 60458865 60458886 60458870 60458865 -
tttttatttttatttttttaat

SEQ ID NO: 226257 - DNA, 22 bp, Artificial Sequence
  Synthetic oligonucleotide; TTT chr2 60458862 60458883 60458867 60458862 -
ttatttttatttttttaatttt

SEQ ID NO: 226258 - DNA, 22 bp, Artificial Sequence
  Synthetic oligonucleotide; TTT chr2 60458861 60458882 60458866 60458861 -
tatttttatttttttaattttt

SEQ ID NO: 226259 - DNA, 22 bp, Artificial Sequence
  Synthetic oligonucleotide; TTT chr2 60458860 60458881 60458865 60458860 -
atttttatttttttaatttttt

SEQ ID NO: 226260 - DNA, 22 bp, Artificial Sequence
  Synthetic oligonucleotide; TTA chr2 60458859 60458880 60458864 60458859 -
tttttatttttttaattttttc

SEQ ID NO: 226261 - DNA, 22 bp, Artificial Sequence
  Synthetic oligonucleotide; TTT chr2 60458856 60458877 60458861 60458856 -
ttatttttttaattttttcttt

SEQ ID NO: 226262 - DNA, 22 bp, Artificial Sequence
  Synthetic oligonucleotide; TTT chr2 60458855 60458876 60458860 60458855 -
tatttttttaattttttctttt

SEQ ID NO: 226263 - DNA, 22 bp, Artificial Sequence
  Synthetic oligonucleotide; TTT chr2 60458854 60458875 60458859 60458854 -
atttttttaattttttcttttt

SEQ ID NO: 226264 - DNA, 22 bp, Artificial Sequence
  Synthetic oligonucleotide; TTA chr2 60458853 60458874 60458858 60458853 -
tttttttaattttttctttttt

SEQ ID NO: 226265 - DNA, 22 bp, Artificial Sequence
  Synthetic oligonucleotide; TTT chr2 60458850 60458871 60458855 60458850 -
ttttaattttttcttttttatt

SEQ ID NO: 226266 - DNA, 22 bp, Artificial Sequence
  Synthetic oligonucleotide; TTT chr2 60458849 60458870 60458854 60458849 -
tttaattttttcttttttatta

SEQ ID NO: 226267 - DNA, 22 bp, Artificial Sequence
  Synthetic oligonucleotide; TTT chr2 60458848 60458869 60458853 60458848 -
ttaattttttcttttttattaa

SEQ ID NO: 226268 - DNA, 22 bp, Artificial Sequence
  Synthetic oligonucleotide; TTT chr2 60458847 60458868 60458852 60458847 -
taattttttcttttttattaag

SEQ ID NO: 226269 - DNA, 22 bp, Artificial Sequence
  Synthetic oligonucleotide; TTT chr2 60458846 60458867 60458851 60458846 -
aattttttcttttttattaagc

SEQ ID NO: 226270 - DNA, 22 bp, Artificial Sequence
  Synthetic oligonucleotide; TTA chr2 60458845 60458866 60458850 60458845 -
attttttcttttttattaagct

SEQ ID NO: 226271 - DNA, 22 bp, Artificial Sequence
  Synthetic oligonucleotide; TTT chr2 60458841 60458862 60458846 60458841 -
tttcttttttattaagctagca

SEQ ID NO: 226272 - DNA, 22 bp, Artificial Sequence
  Synthetic oligonucleotide; TTT chr2 60458840 60458861 60458845 60458840 -
ttcttttttattaagctagcat

SEQ ID NO: 226273 - DNA, 22 bp, Artificial Sequence
  Synthetic oligonucleotide; TTT chr2 60458839 60458860 60458844 60458839 -
tcttttttattaagctagcatc

SEQ ID NO: 226274 - DNA, 22 bp, Artificial Sequence
  Synthetic oligonucleotide; TTT chr2 60458838 60458859 60458843 60458838 -
cttttttattaagctagcatct

SEQ ID NO: 226275 - DNA, 22 bp, Artificial Sequence
  Synthetic oligonucleotide; TTC chr2 60458837 60458858 60458842 60458837 -
ttttttattaagctagcatctg

SEQ ID NO: 226276 - DNA, 22 bp, Artificial Sequence
  Synthetic oligonucleotide; CTT chr2 60458835 60458856 60458840 60458835 -
ttttattaagctagcatctgcc

SEQ ID NO: 226277 - DNA, 22 bp, Artificial Sequence
  Synthetic oligonucleotide; TTT chr2 60458834 60458855 60458839 60458834 -
tttattaagctagcatctgccc

SEQ ID NO: 226278 - DNA, 22 bp, Artificial Sequence
  Synthetic oligonucleotide; TTT chr2 60458833 60458854 60458838 60458833 -
ttattaagctagcatctgcccc

SEQ ID NO: 226279 - DNA, 22 bp, Artificial Sequence
  Synthetic oligonucleotide; TTT chr2 60458832 60458853 60458837 60458832 -
tattaagctagcatctgcccca

SEQ ID NO: 226280 - DNA, 22 bp, Artificial Sequence
  Synthetic oligonucleotide; TTT chr2 60458831 60458852 60458836 60458831 -
attaagctagcatctgccccag

SEQ ID NO: 226281 - DNA, 22 bp, Artificial Sequence
  Synthetic oligonucleotide; TTA chr2 60458830 60458851 60458835 60458830 -
ttaagctagcatctgccccagt

SEQ ID NO: 226282 - DNA, 22 bp, Artificial Sequence
  Synthetic oligonucleotide; TTA chr2 60458827 60458848 60458832 60458827 -
agctagcatctgccccagttgg

SEQ ID NO: 226283 - DNA, 22 bp, Artificial Sequence
  Synthetic oligonucleotide; CTA chr2 60458822 60458843 60458827 60458822 -
gcatctgccccagttggtgttc

SEQ ID NO: 226284 - DNA, 22 bp, Artificial Sequence
  Synthetic oligonucleotide; CTG chr2 60458815 60458836 60458820 60458815 -
ccccagttggtgttcaaatagc

SEQ ID NO: 226285 - DNA, 22 bp, Artificial Sequence
  Synthetic oligonucleotide; TTG chr2 60458806 60458827 60458811 60458806 -
gtgttcaaatagcacttgactc

SEQ ID NO: 226286 - DNA, 22 bp, Artificial Sequence
  Synthetic oligonucleotide; TTC chr2 60458800 60458821 60458805 60458800 -
aaatagcacttgactctgcctg

SEQ ID NO: 226287 - DNA, 22 bp, Artificial Sequence
  Synthetic oligonucleotide; CTT chr2 60458789 60458810 60458794 60458789 -
gactctgcctgtgatatctgta

SEQ ID NO: 226288 - DNA, 22 bp, Artificial Sequence
  Synthetic oligonucleotide; TTG chr2 60458788 60458809 60458793 60458788 -
actctgcctgtgatatctgtat

SEQ ID NO: 226289 - DNA, 22 bp, Artificial Sequence
  Synthetic oligonucleotide; CTC chr2 60458784 60458805 60458789 60458784 -
tgcctgtgatatctgtatcttt

SEQ ID NO: 226290 - DNA, 22 bp, Artificial Sequence
  Synthetic oligonucleotide; CTG chr2 60458782 60458803 60458787 60458782 -
cctgtgatatctgtatcttttc

SEQ ID NO: 226291 - DNA, 22 bp, Artificial Sequence
  Synthetic oligonucleotide; CTG chr2 60458778 60458799 60458783 60458778 -
tgatatctgtatcttttctcta

SEQ ID NO: 226292 - DNA, 22 bp, Artificial Sequence
  Synthetic oligonucleotide; CTG chr2 60458769 60458790 60458774 60458769 -
tatcttttctctaatcagagat

SEQ ID NO: 226293 - DNA, 22 bp, Artificial Sequence
  Synthetic oligonucleotide; CTT chr2 60458763 60458784 60458768 60458763 -
ttctctaatcagagatacagag

SEQ ID NO: 226294 - DNA, 22 bp, Artificial Sequence
  Synthetic oligonucleotide; TTT chr2 60458762 60458783 60458767 60458762 -
tctctaatcagagatacagagg

SEQ ID NO: 226295 - DNA, 22 bp, Artificial Sequence
  Synthetic oligonucleotide; TTT chr2 60458761 60458782 60458766 60458761 -
ctctaatcagagatacagaggt

SEQ ID NO: 226296 - DNA, 22 bp, Artificial Sequence
  Synthetic oligonucleotide; TTC chr2 60458760 60458781 60458765 60458760 -
tctaatcagagatacagaggtt

SEQ ID NO: 226297 - DNA, 22 bp, Artificial Sequence
  Synthetic oligonucleotide; CTC chr2 60458758 60458779 60458763 60458758 -
taatcagagatacagaggttga

SEQ ID NO: 226298 - DNA, 22 bp, Artificial Sequence
  Synthetic oligonucleotide; CTA chr2 60458756 60458777 60458761 60458756 -
atcagagatacagaggttgagt

SEQ ID NO: 226299 - DNA, 22 bp, Artificial Sequence
  Synthetic oligonucleotide; TTG chr2 60458737 60458758 60458742 60458737 -
agtataaaataaacctgctcag

SEQ ID NO: 226300 - DNA, 22 bp, Artificial Sequence
  Synthetic oligonucleotide; CTG chr2 60458720 60458741 60458725 60458720 -
ctcagataggacaattaagtgc

SEQ ID NO: 226301 - DNA, 22 bp, Artificial Sequence
  Synthetic oligonucleotide; CTC chr2 60458717 60458738 60458722 60458717 -
agataggacaattaagtgcact

SEQ ID NO: 226302 - DNA, 22 bp, Artificial Sequence
  Synthetic oligonucleotide; TTA chr2 60458703 60458724 60458708 60458703 -
agtgcactgtacaattttccca

SEQ ID NO: 226303 - DNA, 22 bp, Artificial Sequence
  Synthetic oligonucleotide; CTG chr2 60458694 60458715 60458699 60458694 -
tacaattttcccagtttacagg

SEQ ID NO: 226304 - DNA, 22 bp, Artificial Sequence
  Synthetic oligonucleotide; TTT chr2 60458686 60458707 60458691 60458686 -
tcccagtttacaggtctatact

SEQ ID NO: 226305 - DNA, 22 bp, Artificial Sequence
  Synthetic oligonucleotide; TTT chr2 60458685 60458706 60458690 60458685 -
cccagtttacaggtctatactt

SEQ ID NO: 226306 - DNA, 22 bp, Artificial Sequence
  Synthetic oligonucleotide; TTC chr2 60458684 60458705 60458689 60458684 -
ccagtttacaggtctatactta

SEQ ID NO: 226307 - DNA, 22 bp, Artificial Sequence
  Synthetic oligonucleotide; TTT chr2 60458677 60458698 60458682 60458677 -
acaggtctatacttaagggaaa

SEQ ID NO: 226308 - DNA, 22 bp, Artificial Sequence
  Synthetic oligonucleotide; TTA chr2 60458676 60458697 60458681 60458676 -
caggtctatacttaagggaaaa

SEQ ID NO: 226309 - DNA, 22 bp, Artificial Sequence
  Synthetic oligonucleotide; CTA chr2 60458668 60458689 60458673 60458668 -
tacttaagggaaaagttgcaag

SEQ ID NO: 226310 - DNA, 22 bp, Artificial Sequence
  Synthetic oligonucleotide; CTT chr2 60458663 60458684 60458668 60458663 -
aagggaaaagttgcaagaatgc

SEQ ID NO: 226311 - DNA, 22 bp, Artificial Sequence
  Synthetic oligonucleotide; TTA chr2 60458662 60458683 60458667 60458662 -
agggaaaagttgcaagaatgct

SEQ ID NO: 226312 - DNA, 22 bp, Artificial Sequence
  Synthetic oligonucleotide; TTG chr2 60458650 60458671 60458655 60458650 -
caagaatgctgaaaaaaaattg

SEQ ID NO: 226313 - DNA, 22 bp, Artificial Sequence
  Synthetic oligonucleotide; CTG chr2 60458639 60458660 60458644 60458639 -
aaaaaaaattgaacacaatctc

SEQ ID NO: 226314 - DNA, 22 bp, Artificial Sequence
  Synthetic oligonucleotide; TTG chr2 60458628 60458649 60458633 60458628 -
aacacaatctcattgaggagca

SEQ ID NO: 226315 - DNA, 22 bp, Artificial Sequence
  Synthetic oligonucleotide; CTC chr2 60458617 60458638 60458622 60458617 -
attgaggagcattttttaaaaa

SEQ ID NO: 226316 - DNA, 22 bp, Artificial Sequence
  Synthetic oligonucleotide; TTG chr2 60458613 60458634 60458618 60458613 -
aggagcattttttaaaaactaa

SEQ ID NO: 226317 - DNA, 22 bp, Artificial Sequence
  Synthetic oligonucleotide; TTT chr2 60458603 60458624 60458608 60458603 -
tttaaaaactaaaaaaaaaaaa

SEQ ID NO: 226318 - DNA, 22 bp, Artificial Sequence
  Synthetic oligonucleotide; TTT chr2 60458602 60458623 60458607 60458602 -
ttaaaaactaaaaaaaaaaaaa

SEQ ID NO: 226319 - DNA, 22 bp, Artificial Sequence
  Synthetic oligonucleotide; TTT chr2 60458601 60458622 60458606 60458601 -
taaaaactaaaaaaaaaaaaac

SEQ ID NO: 226320 - DNA, 22 bp, Artificial Sequence
  Synthetic oligonucleotide; TTT chr2 60458600 60458621 60458605 60458600 -
aaaaactaaaaaaaaaaaaact

SEQ ID NO: 226321 - DNA, 22 bp, Artificial Sequence
  Synthetic oligonucleotide; TTA chr2 60458599 60458620 60458604 60458599 -
aaaactaaaaaaaaaaaaactt

SEQ ID NO: 226322 - DNA, 22 bp, Artificial Sequence
  Synthetic oligonucleotide; CTA chr2 60458592 60458613 60458597 60458592 -
aaaaaaaaaaaactttgccagc

SEQ ID NO: 226323 - DNA, 22 bp, Artificial Sequence
  Synthetic oligonucleotide; CTT chr2 60458577 60458598 60458582 60458577 -
tgccagccatttacttgactat

SEQ ID NO: 226324 - DNA, 22 bp, Artificial Sequence
  Synthetic oligonucleotide; TTT chr2 60458576 60458597 60458581 60458576 -
gccagccatttacttgactatt

SEQ ID NO: 226325 - DNA, 22 bp, Artificial Sequence
  Synthetic oligonucleotide; TTG chr2 60458575 60458596 60458580 60458575 -
ccagccatttacttgactattg

SEQ ID NO: 226326 - DNA, 22 bp, Artificial Sequence
  Synthetic oligonucleotide; TTT chr2 60458565 60458586 60458570 60458565 -
acttgactattgagcttactta

SEQ ID NO: 226327 - DNA, 22 bp, Artificial Sequence
  Synthetic oligonucleotide; TTA chr2 60458564 60458585 60458569 60458564 -
cttgactattgagcttacttac

SEQ ID NO: 226328 - DNA, 22 bp, Artificial Sequence
  Synthetic oligonucleotide; CTT chr2 60458561 60458582 60458566 60458561 -
gactattgagcttacttacttg

SEQ ID NO: 226329 - DNA, 22 bp, Artificial Sequence
  Synthetic oligonucleotide; TTG chr2 60458560 60458581 60458565 60458560 -
actattgagcttacttacttgg

SEQ ID NO: 226330 - DNA, 22 bp, Artificial Sequence
  Synthetic oligonucleotide; CTA chr2 60458556 60458577 60458561 60458556 -
ttgagcttacttacttggacgc

SEQ ID NO: 226331 - DNA, 22 bp, Artificial Sequence
  Synthetic oligonucleotide; TTG chr2 60458553 60458574 60458558 60458553 -
agcttacttacttggacgcaac

SEQ ID NO: 226332 - DNA, 22 bp, Artificial Sequence
  Synthetic oligonucleotide; CTT chr2 60458548 60458569 60458553 60458548 -
acttacttggacgcaacattgc

SEQ ID NO: 226333 - DNA, 22 bp, Artificial Sequence
  Synthetic oligonucleotide; TTA chr2 60458547 60458568 60458552 60458547 -
cttacttggacgcaacattgca

SEQ ID NO: 226334 - DNA, 22 bp, Artificial Sequence
  Synthetic oligonucleotide; CTT chr2 60458544 60458565 60458549 60458544 -
acttggacgcaacattgcaagc

SEQ ID NO: 226335 - DNA, 22 bp, Artificial Sequence
  Synthetic oligonucleotide; TTA chr2 60458543 60458564 60458548 60458543 -
cttggacgcaacattgcaagcg

SEQ ID NO: 226336 - DNA, 22 bp, Artificial Sequence
  Synthetic oligonucleotide; CTT chr2 60458540 60458561 60458545 60458540 -
ggacgcaacattgcaagcgctg

SEQ ID NO: 226337 - DNA, 22 bp, Artificial Sequence
  Synthetic oligonucleotide; TTG chr2 60458539 60458560 60458544 60458539 -
gacgcaacattgcaagcgctgt

SEQ ID NO: 226338 - DNA, 22 bp, Artificial Sequence
  Synthetic oligonucleotide; TTG chr2 60458527 60458548 60458532 60458527 -
caagcgctgtgaatggaaacag

SEQ ID NO: 226339 - DNA, 22 bp, Artificial Sequence
  Synthetic oligonucleotide; CTG chr2 60458518 60458539 60458523 60458518 -
tgaatggaaacagaatacactt

SEQ ID NO: 226340 - DNA, 22 bp, Artificial Sequence
  Synthetic oligonucleotide; CTT chr2 60458496 60458517 60458501 60458496 -
aacatagaaatgaatgattgct

SEQ ID NO: 226341 - DNA, 22 bp, Artificial Sequence
  Synthetic oligonucleotide; TTA chr2 60458495 60458516 60458500 60458495 -
acatagaaatgaatgattgctt

SEQ ID NO: 226342 - DNA, 22 bp, Artificial Sequence
  Synthetic oligonucleotide; TTG chr2 60458476 60458497 60458481 60458476 -
ctttcgcttctacagtgcaagg

SEQ ID NO: 226343 - DNA, 22 bp, Artificial Sequence
  Synthetic oligonucleotide; CTT chr2 60458473 60458494 60458478 60458473 -
tcgcttctacagtgcaaggatt

SEQ ID NO: 226344 - DNA, 22 bp, Artificial Sequence
  Synthetic oligonucleotide; TTT chr2 60458472 60458493 60458477 60458472 -
cgcttctacagtgcaaggattt

SEQ ID NO: 226345 - DNA, 22 bp, Artificial Sequence
  Synthetic oligonucleotide; TTC chr2 60458471 60458492 60458476 60458471 -
gcttctacagtgcaaggatttt

SEQ ID NO: 226346 - DNA, 22 bp, Artificial Sequence
  Synthetic oligonucleotide; CTT chr2 60458467 60458488 60458472 60458467 -
ctacagtgcaaggatttttttg

SEQ ID NO: 226347 - DNA, 22 bp, Artificial Sequence
  Synthetic oligonucleotide; TTC chr2 60458466 60458487 60458471 60458466 -
tacagtgcaaggatttttttgt

SEQ ID NO: 226348 - DNA, 22 bp, Artificial Sequence
  Synthetic oligonucleotide; CTA chr2 60458464 60458485 60458469 60458464 -
cagtgcaaggatttttttgtac

SEQ ID NO: 226349 - DNA, 22 bp, Artificial Sequence
  Synthetic oligonucleotide; TTT chr2 60458450 60458471 60458455 60458450 -
ttttgtacaaaacttttttaaa

SEQ ID NO: 226350 - DNA, 22 bp, Artificial Sequence
  Synthetic oligonucleotide; TTT chr2 60458449 60458470 60458454 60458449 -
tttgtacaaaacttttttaaat

SEQ ID NO: 226351 - DNA, 22 bp, Artificial Sequence
  Synthetic oligonucleotide; TTT chr2 60458448 60458469 60458453 60458448 -
ttgtacaaaacttttttaaata

SEQ ID NO: 226352 - DNA, 22 bp, Artificial Sequence
  Synthetic oligonucleotide; TTT chr2 60458447 60458468 60458452 60458447 -
tgtacaaaacttttttaaatat

SEQ ID NO: 226353 - DNA, 22 bp, Artificial Sequence
  Synthetic oligonucleotide; TTT chr2 60458446 60458467 60458451 60458446 -
gtacaaaacttttttaaatata

SEQ ID NO: 226354 - DNA, 22 bp, Artificial Sequence
  Synthetic oligonucleotide; TTG chr2 60458445 60458466 60458450 60458445 -
tacaaaacttttttaaatataa

SEQ ID NO: 226355 - DNA, 22 bp, Artificial Sequence
  Synthetic oligonucleotide; CTT chr2 60458435 60458456 60458440 60458435 -
ttttaaatataaatgttaagaa

SEQ ID NO: 226356 - DNA, 22 bp, Artificial Sequence
  Synthetic oligonucleotide; TTT chr2 60458434 60458455 60458439 60458434 -
tttaaatataaatgttaagaaa

SEQ ID NO: 226357 - DNA, 22 bp, Artificial Sequence
  Synthetic oligonucleotide; TTT chr2 60458433 60458454 60458438 60458433 -
ttaaatataaatgttaagaaaa

SEQ ID NO: 226358 - DNA, 22 bp, Artificial Sequence
  Synthetic oligonucleotide; TTT chr2 60458432 60458453 60458437 60458432 -
taaatataaatgttaagaaaaa

SEQ ID NO: 226359 - DNA, 22 bp, Artificial Sequence
  Synthetic oligonucleotide; TTT chr2 60458431 60458452 60458436 60458431 -
aaatataaatgttaagaaaaat

SEQ ID NO: 226360 - DNA, 22 bp, Artificial Sequence
  Synthetic oligonucleotide; TTA chr2 60458430 60458451 60458435 60458430 -
aatataaatgttaagaaaaatt

SEQ ID NO: 226361 - DNA, 22 bp, Artificial Sequence
  Synthetic oligonucleotide; TTA chr2 60458417 60458438 60458422 60458417 -
agaaaaattttttttaaaaaac

SEQ ID NO: 226362 - DNA, 22 bp, Artificial Sequence
  Synthetic oligonucleotide; TTT chr2 60458407 60458428 60458412 60458407 -
tttttaaaaaacacttcattat

SEQ ID NO: 226363 - DNA, 22 bp, Artificial Sequence
  Synthetic oligonucleotide; TTT chr2 60458406 60458427 60458411 60458406 -
ttttaaaaaacacttcattatg

SEQ ID NO: 226364 - DNA, 22 bp, Artificial Sequence
  Synthetic oligonucleotide; TTT chr2 60458405 60458426 60458410 60458405 -
tttaaaaaacacttcattatgt

SEQ ID NO: 226365 - DNA, 22 bp, Artificial Sequence
  Synthetic oligonucleotide; TTT chr2 60458404 60458425 60458409 60458404 -
ttaaaaaacacttcattatgtt

SEQ ID NO: 226366 - DNA, 22 bp, Artificial Sequence
  Synthetic oligonucleotide; TTT chr2 60458403 60458424 60458408 60458403 -
taaaaaacacttcattatgttt

SEQ ID NO: 226367 - DNA, 22 bp, Artificial Sequence
  Synthetic oligonucleotide; TTT chr2 60458402 60458423 60458407 60458402 -
aaaaaacacttcattatgttta

SEQ ID NO: 226368 - DNA, 22 bp, Artificial Sequence
  Synthetic oligonucleotide; TTA chr2 60458401 60458422 60458406 60458401 -
aaaaacacttcattatgtttag

SEQ ID NO: 226369 - DNA, 22 bp, Artificial Sequence
  Synthetic oligonucleotide; CTT chr2 60458391 60458412 60458396 60458391 -
cattatgtttaggggggaactg

SEQ ID NO: 226370 - DNA, 22 bp, Artificial Sequence
  Synthetic oligonucleotide; TTC chr2 60458390 60458411 60458395 60458390 -
attatgtttaggggggaactgc

SEQ ID NO: 226371 - DNA, 22 bp, Artificial Sequence
  Synthetic oligonucleotide; TTA chr2 60458386 60458407 60458391 60458386 -
tgtttaggggggaactgcattt

SEQ ID NO: 226372 - DNA, 22 bp, Artificial Sequence
  Synthetic oligonucleotide; TTT chr2 60458381 60458402 60458386 60458381 -
aggggggaactgcattttaggg

SEQ ID NO: 226373 - DNA, 22 bp, Artificial Sequence
  Synthetic oligonucleotide; TTA chr2 60458380 60458401 60458385 60458380 -
ggggggaactgcattttagggt

SEQ ID NO: 226374 - DNA, 22 bp, Artificial Sequence
  Synthetic oligonucleotide; CTG chr2 60458369 60458390 60458374 60458369 -
cattttagggttccattgtctt

SEQ ID NO: 226375 - DNA, 22 bp, Artificial Sequence
  Synthetic oligonucleotide; TTT chr2 60458364 60458385 60458369 60458364 -
tagggttccattgtcttggtgg

SEQ ID NO: 226376 - DNA, 22 bp, Artificial Sequence
  Synthetic oligonucleotide; TTT chr2 60458363 60458384 60458368 60458363 -
agggttccattgtcttggtggt

SEQ ID NO: 226377 - DNA, 22 bp, Artificial Sequence
  Synthetic oligonucleotide; TTA chr2 60458362 60458383 60458367 60458362 -
gggttccattgtcttggtggtg

SEQ ID NO: 226378 - DNA, 22 bp, Artificial Sequence
  Synthetic oligonucleotide; TTC chr2 60458356 60458377 60458361 60458356 -
cattgtcttggtggtgttacaa

SEQ ID NO: 226379 - DNA, 22 bp, Artificial Sequence
  Synthetic oligonucleotide; TTG chr2 60458351 60458372 60458356 60458351 -
tcttggtggtgttacaagactt

SEQ ID NO: 226380 - DNA, 22 bp, Artificial Sequence
  Synthetic oligonucleotide; CTT chr2 60458347 60458368 60458352 60458347 -
ggtggtgttacaagacttgtta

SEQ ID NO: 226381 - DNA, 22 bp, Artificial Sequence
  Synthetic oligonucleotide; TTG chr2 60458346 60458367 60458351 60458346 -
gtggtgttacaagacttgttat

SEQ ID NO: 226382 - DNA, 22 bp, Artificial Sequence
  Synthetic oligonucleotide; TTA chr2 60458337 60458358 60458342 60458337 -
caagacttgttatccatttaaa

SEQ ID NO: 226383 - DNA, 22 bp, Artificial Sequence
  Synthetic oligonucleotide; CTT chr2 60458329 60458350 60458334 60458329 -
gttatccatttaaaaatggtag

SEQ ID NO: 226384 - DNA, 22 bp, Artificial Sequence
  Synthetic oligonucleotide; TTG chr2 60458328 60458349 60458333 60458328 -
ttatccatttaaaaatggtagt

SEQ ID NO: 226385 - DNA, 22 bp, Artificial Sequence
  Synthetic oligonucleotide; TTA chr2 60458325 60458346 60458330 60458325 -
tccatttaaaaatggtagtgga

SEQ ID NO: 226386 - DNA, 22 bp, Artificial Sequence
  Synthetic oligonucleotide; TTT chr2 60458318 60458339 60458323 60458318 -
aaaaatggtagtggaaattcta

SEQ ID NO: 226387 - DNA, 22 bp, Artificial Sequence
  Synthetic oligonucleotide; TTA chr2 60458317 60458338 60458322 60458317 -
aaaatggtagtggaaattctat

SEQ ID NO: 226388 - DNA, 22 bp, Artificial Sequence
  Synthetic oligonucleotide; TTC chr2 60458298 60458319 60458303 60458298 -
tatgccttggatacacaccgct

SEQ ID NO: 226389 - DNA, 22 bp, Artificial Sequence
  Synthetic oligonucleotide; CTA chr2 60458296 60458317 60458301 60458296 -
tgccttggatacacaccgctct

SEQ ID NO: 226390 - DNA, 22 bp, Artificial Sequence
  Synthetic oligonucleotide; CTT chr2 60458290 60458311 60458295 60458290 -
ggatacacaccgctcttcaggt

SEQ ID NO: 226391 - DNA, 22 bp, Artificial Sequence
  Synthetic oligonucleotide; TTG chr2 60458289 60458310 60458294 60458289 -
gatacacaccgctcttcaggtt

SEQ ID NO: 226392 - DNA, 22 bp, Artificial Sequence
  Synthetic oligonucleotide; CTC chr2 60458275 60458296 60458280 60458275 -
ttcaggttgtaaaaaaaaaaaa

SEQ ID NO: 226393 - DNA, 22 bp, Artificial Sequence
  Synthetic oligonucleotide; CTT chr2 60458273 60458294 60458278 60458273 -
caggttgtaaaaaaaaaaaaca

SEQ ID NO: 226394 - DNA, 22 bp, Artificial Sequence
  Synthetic oligonucleotide; TTC chr2 60458272 60458293 60458277 60458272 -
aggttgtaaaaaaaaaaaacat

SEQ ID NO: 226395 - DNA, 22 bp, Artificial Sequence
  Synthetic oligonucleotide; TTG chr2 60458266 60458287 60458271 60458266 -
taaaaaaaaaaaacatacattg

SEQ ID NO: 226396 - DNA, 22 bp, Artificial Sequence
  Synthetic oligonucleotide; TTG chr2 60458244 60458265 60458249 60458244 -
gggaaaggtttaagattatata

SEQ ID NO: 226397 - DNA, 22 bp, Artificial Sequence
  Synthetic oligonucleotide; TTT chr2 60458233 60458254 60458238 60458233 -
aagattatatagtacttaaata

SEQ ID NO: 226398 - DNA, 22 bp, Artificial Sequence
  Synthetic oligonucleotide; TTA chr2 60458232 60458253 60458237 60458232 -
agattatatagtacttaaatat

SEQ ID NO: 226399 - DNA, 22 bp, Artificial Sequence
  Synthetic oligonucleotide; TTA chr2 60458226 60458247 60458231 60458226 -
tatagtacttaaatataggaaa

SEQ ID NO: 226400 - DNA, 22 bp, Artificial Sequence
  Synthetic oligonucleotide; CTT chr2 60458216 60458237 60458221 60458216 -
aaatataggaaaatgcacactc

SEQ ID NO: 226401 - DNA, 22 bp, Artificial Sequence
  Synthetic oligonucleotide; TTA chr2 60458215 60458236 60458220 60458215 -
aatataggaaaatgcacactca

SEQ ID NO: 226402 - DNA, 22 bp, Artificial Sequence
  Synthetic oligonucleotide; CTC chr2 60458194 60458215 60458199 60458194 -
atgttgattcctatgctaaaat

SEQ ID NO: 226403 - DNA, 22 bp, Artificial Sequence
  Synthetic oligonucleotide; TTG chr2 60458188 60458209 60458193 60458188 -
attcctatgctaaaatacattt

SEQ ID NO: 226404 - DNA, 22 bp, Artificial Sequence
  Synthetic oligonucleotide; TTC chr2 60458184 60458205 60458189 60458184 -
ctatgctaaaatacatttatgg

SEQ ID NO: 226405 - DNA, 22 bp, Artificial Sequence
  Synthetic oligonucleotide; CTA chr2 60458181 60458202 60458186 60458181 -
tgctaaaatacatttatggtct

SEQ ID NO: 226406 - DNA, 22 bp, Artificial Sequence
  Synthetic oligonucleotide; CTA chr2 60458176 60458197 60458181 60458176 -
aaatacatttatggtctttttt

SEQ ID NO: 226407 - DNA, 22 bp, Artificial Sequence
  Synthetic oligonucleotide; TTT chr2 60458166 60458187 60458171 60458166 -
atggtcttttttctgtatttct

SEQ ID NO: 226408 - DNA, 22 bp, Artificial Sequence
  Synthetic oligonucleotide; TTA chr2 60458165 60458186 60458170 60458165 -
tggtcttttttctgtatttcta

SEQ ID NO: 226409 - DNA, 22 bp, Artificial Sequence
  Synthetic oligonucleotide; CTT chr2 60458158 60458179 60458163 60458158 -
ttttctgtatttctagaatggt

SEQ ID NO: 226410 - DNA, 22 bp, Artificial Sequence
  Synthetic oligonucleotide; TTT chr2 60458157 60458178 60458162 60458157 -
tttctgtatttctagaatggta

SEQ ID NO: 226411 - DNA, 22 bp, Artificial Sequence
  Synthetic oligonucleotide; TTT chr2 60458156 60458177 60458161 60458156 -
ttctgtatttctagaatggtat

SEQ ID NO: 226412 - DNA, 22 bp, Artificial Sequence
  Synthetic oligonucleotide; TTT chr2 60458155 60458176 60458160 60458155 -
tctgtatttctagaatggtatt

SEQ ID NO: 226413 - DNA, 22 bp, Artificial Sequence
  Synthetic oligonucleotide; TTT chr2 60458154 60458175 60458159 60458154 -
ctgtatttctagaatggtattt

SEQ ID NO: 226414 - DNA, 22 bp, Artificial Sequence
  Synthetic oligonucleotide; TTC chr2 60458153 60458174 60458158 60458153 -
tgtatttctagaatggtatttg

SEQ ID NO: 226415 - DNA, 22 bp, Artificial Sequence
  Synthetic oligonucleotide; CTG chr2 60458151 60458172 60458156 60458151 -
tatttctagaatggtatttgaa

SEQ ID NO: 226416 - DNA, 22 bp, Artificial Sequence
  Synthetic oligonucleotide; TTT chr2 60458146 60458167 60458151 60458146 -
ctagaatggtatttgaattaaa

SEQ ID NO: 226417 - DNA, 22 bp, Artificial Sequence
  Synthetic oligonucleotide; TTC chr2 60458145 60458166 60458150 60458145 -
tagaatggtatttgaattaaat

SEQ ID NO: 226418 - DNA, 22 bp, Artificial Sequence
  Synthetic oligonucleotide; CTA chr2 60458143 60458164 60458148 60458143 -
gaatggtatttgaattaaatgt

SEQ ID NO: 226419 - DNA, 22 bp, Artificial Sequence
  Synthetic oligonucleotide; TTT chr2 60458132 60458153 60458137 60458132 -
gaattaaatgttcatctagtgt

SEQ ID NO: 226420 - DNA, 22 bp, Artificial Sequence
  Synthetic oligonucleotide; TTG chr2 60458131 60458152 60458136 60458131 -
aattaaatgttcatctagtgtt

SEQ ID NO: 226421 - DNA, 22 bp, Artificial Sequence
  Synthetic oligonucleotide; TTA chr2 60458126 60458147 60458131 60458126 -
aatgttcatctagtgttaggca

SEQ ID NO: 226422 - DNA, 22 bp, Artificial Sequence
  Synthetic oligonucleotide; TTC chr2 60458119 60458140 60458124 60458119 -
atctagtgttaggcactatagt

SEQ ID NO: 226423 - DNA, 22 bp, Artificial Sequence
  Synthetic oligonucleotide; CTA chr2 60458114 60458135 60458119 60458114 -
gtgttaggcactatagtattta

SEQ ID NO: 226424 - DNA, 22 bp, Artificial Sequence
  Synthetic oligonucleotide; TTA chr2 60458108 60458129 60458113 60458108 -
ggcactatagtatttatattga

SEQ ID NO: 226425 - DNA, 22 bp, Artificial Sequence
  Synthetic oligonucleotide; CTA chr2 60458101 60458122 60458106 60458101 -
tagtatttatattgaagcttgt

SEQ ID NO: 226426 - DNA, 22 bp, Artificial Sequence
  Synthetic oligonucleotide; TTT chr2 60458093 60458114 60458098 60458093 -
atattgaagcttgtatttttaa

SEQ ID NO: 226427 - DNA, 22 bp, Artificial Sequence
  Synthetic oligonucleotide; TTA chr2 60458092 60458113 60458097 60458092 -
tattgaagcttgtatttttaac

SEQ ID NO: 226428 - DNA, 22 bp, Artificial Sequence
  Synthetic oligonucleotide; TTG chr2 60458087 60458108 60458092 60458087 -
aagcttgtatttttaactgttg

SEQ ID NO: 226429 - DNA, 22 bp, Artificial Sequence
  Synthetic oligonucleotide; CTT chr2 60458081 60458102 60458086 60458081 -
gtatttttaactgttgcttgtt

SEQ ID NO: 226430 - DNA, 22 bp, Artificial Sequence
  Synthetic oligonucleotide; TTG chr2 60458080 60458101 60458085 60458080 -
tatttttaactgttgcttgttc

SEQ ID NO: 226431 - DNA, 22 bp, Artificial Sequence
  Synthetic oligonucleotide; TTT chr2 60458075 60458096 60458080 60458075 -
ttaactgttgcttgttctctta

SEQ ID NO: 226432 - DNA, 22 bp, Artificial Sequence
  Synthetic oligonucleotide; TTT chr2 60458074 60458095 60458079 60458074 -
taactgttgcttgttctcttaa

SEQ ID NO: 226433 - DNA, 22 bp, Artificial Sequence
  Synthetic oligonucleotide; TTT chr2 60458073 60458094 60458078 60458073 -
aactgttgcttgttctcttaaa

SEQ ID NO: 226434 - DNA, 22 bp, Artificial Sequence
  Synthetic oligonucleotide; TTA chr2 60458072 60458093 60458077 60458072 -
actgttgcttgttctcttaaaa

SEQ ID NO: 226435 - DNA, 22 bp, Artificial Sequence
  Synthetic oligonucleotide; CTG chr2 60458068 60458089 60458073 60458068 -
ttgcttgttctcttaaaaggta

SEQ ID NO: 226436 - DNA, 22 bp, Artificial Sequence
  Synthetic oligonucleotide; TTG chr2 60458065 60458086 60458070 60458065 -
cttgttctcttaaaaggtatca

SEQ ID NO: 226437 - DNA, 22 bp, Artificial Sequence
  Synthetic oligonucleotide; CTT chr2 60458062 60458083 60458067 60458062 -
gttctcttaaaaggtatcaatg

SEQ ID NO: 226438 - DNA, 22 bp, Artificial Sequence
  Synthetic oligonucleotide; TTG chr2 60458061 60458082 60458066 60458061 -
ttctcttaaaaggtatcaatgt

SEQ ID NO: 226439 - DNA, 22 bp, Artificial Sequence
  Synthetic oligonucleotide; TTC chr2 60458058 60458079 60458063 60458058 -
tcttaaaaggtatcaatgtacc

SEQ ID NO: 226440 - DNA, 22 bp, Artificial Sequence
  Synthetic oligonucleotide; CTC chr2 60458056 60458077 60458061 60458056 -
ttaaaaggtatcaatgtacctt

SEQ ID NO: 226441 - DNA, 22 bp, Artificial Sequence
  Synthetic oligonucleotide; CTT chr2 60458054 60458075 60458059 60458054 -
aaaaggtatcaatgtacctttt

SEQ ID NO: 226442 - DNA, 22 bp, Artificial Sequence
  Synthetic oligonucleotide; TTA chr2 60458053 60458074 60458058 60458053 -
aaaggtatcaatgtaccttttt

SEQ ID NO: 226443 - DNA, 22 bp, Artificial Sequence
  Synthetic oligonucleotide; CTT chr2 60458034 60458055 60458039 60458034 -
ttttggtagtggaaaaaaaaaa

SEQ ID NO: 226444 - DNA, 22 bp, Artificial Sequence
  Synthetic oligonucleotide; TTT chr2 60458033 60458054 60458038 60458033 -
tttggtagtggaaaaaaaaaag

SEQ ID NO: 226445 - DNA, 22 bp, Artificial Sequence
  Synthetic oligonucleotide; TTT chr2 60458032 60458053 60458037 60458032 -
ttggtagtggaaaaaaaaaaga

SEQ ID NO: 226446 - DNA, 22 bp, Artificial Sequence
  Synthetic oligonucleotide; TTT chr2 60458031 60458052 60458036 60458031 -
tggtagtggaaaaaaaaaagac

SEQ ID NO: 226447 - DNA, 22 bp, Artificial Sequence
  Synthetic oligonucleotide; TTT chr2 60458030 60458051 60458035 60458030 -
ggtagtggaaaaaaaaaagaca

SEQ ID NO: 226448 - DNA, 22 bp, Artificial Sequence
  Synthetic oligonucleotide; TTG chr2 60458029 60458050 60458034 60458029 -
gtagtggaaaaaaaaaagacag

SEQ ID NO: 226449 - DNA, 22 bp, Artificial Sequence
  Synthetic oligonucleotide; CTG chr2 60458003 60458024 60458008 60458003 -
ccacagtatatttttttaattt

SEQ ID NO: 226450 - DNA, 22 bp, Artificial Sequence
  Synthetic oligonucleotide; TTT chr2 60457990 60458011 60457995 60457990 -
ttttaatttggcaggataatat

SEQ ID NO: 226451 - DNA, 22 bp, Artificial Sequence
  Synthetic oligonucleotide; TTT chr2 60457989 60458010 60457994 60457989 -
tttaatttggcaggataatata

SEQ ID NO: 226452 - DNA, 22 bp, Artificial Sequence
  Synthetic oligonucleotide; TTT chr2 60457988 60458009 60457993 60457988 -
ttaatttggcaggataatatag

SEQ ID NO: 226453 - DNA, 22 bp, Artificial Sequence
  Synthetic oligonucleotide; TTT chr2 60457987 60458008 60457992 60457987 -
taatttggcaggataatatagt

SEQ ID NO: 226454 - DNA, 22 bp, Artificial Sequence
  Synthetic oligonucleotide; TTT chr2 60457986 60458007 60457991 60457986 -
aatttggcaggataatatagtg

SEQ ID NO: 226455 - DNA, 22 bp, Artificial Sequence
  Synthetic oligonucleotide; TTA chr2 60457985 60458006 60457990 60457985 -
atttggcaggataatatagtgc

SEQ ID NO: 226456 - DNA, 22 bp, Artificial Sequence
  Synthetic oligonucleotide; TTT chr2 60457981 60458002 60457986 60457981 -
ggcaggataatatagtgcaaat

SEQ ID NO: 226457 - DNA, 22 bp, Artificial Sequence
  Synthetic oligonucleotide; TTG chr2 60457980 60458001 60457985 60457980 -
gcaggataatatagtgcaaatt

SEQ ID NO: 226458 - DNA, 22 bp, Artificial Sequence
  Synthetic oligonucleotide; TTA chr2 60457957 60457978 60457962 60457957 -
tttgtatgcttcaaaaaaaaaa

SEQ ID NO: 226459 - DNA, 22 bp, Artificial Sequence
  Synthetic oligonucleotide; TTT chr2 60457954 60457975 60457959 60457954 -
gtatgcttcaaaaaaaaaaaaa

SEQ ID NO: 226460 - DNA, 22 bp, Artificial Sequence
  Synthetic oligonucleotide; TTG chr2 60457953 60457974 60457958 60457953 -
tatgcttcaaaaaaaaaaaaaa

SEQ ID NO: 226461 - DNA, 22 bp, Artificial Sequence
  Synthetic oligonucleotide; CTT chr2 60457946 60457967 60457951 60457946 -
caaaaaaaaaaaaaagagagaa

SEQ ID NO: 226462 - DNA, 22 bp, Artificial Sequence
  Synthetic oligonucleotide; TTC chr2 60457945 60457966 60457950 60457945 -
aaaaaaaaaaaaaagagagaaa

SEQ ID NO: 226463 - DNA, 22 bp, Artificial Sequence
  Synthetic oligonucleotide; TTA chr2 60457905 60457926 60457910 60457905 -
cagatgagaagccatataatgg

SEQ ID NO: 226464 - DNA, 22 bp, Artificial Sequence
  Synthetic oligonucleotide; TTT chr2 60457877 60457898 60457882 60457877 -
gggggagcctgctagaatgtca

SEQ ID NO: 226465 - DNA, 22 bp, Artificial Sequence
  Synthetic oligonucleotide; TTG chr2 60457876 60457897 60457881 60457876 -
ggggagcctgctagaatgtcac

SEQ ID NO: 226466 - DNA, 22 bp, Artificial Sequence
  Synthetic oligonucleotide; CTG chr2 60457866 60457887 60457871 60457866 -
ctagaatgtcacatggatggct

SEQ ID NO: 226467 - DNA, 22 bp, Artificial Sequence
  Synthetic oligonucleotide; CTA chr2 60457863 60457884 60457868 60457863 -
gaatgtcacatggatggctgtc

SEQ ID NO: 226468 - DNA, 22 bp, Artificial Sequence
  Synthetic oligonucleotide; CTG chr2 60457843 60457864 60457848 60457843 -
tcataggggttgtacatatcct

SEQ ID NO: 226469 - DNA, 22 bp, Artificial Sequence
  Synthetic oligonucleotide; TTG chr2 60457831 60457852 60457836 60457831 -
tacatatccttttttgttcctt

SEQ ID NO: 226470 - DNA, 22 bp, Artificial Sequence
  Synthetic oligonucleotide; CTT chr2 60457820 60457841 60457825 60457820 -
ttttgttcctttttcctgctgc

SEQ ID NO: 226471 - DNA, 22 bp, Artificial Sequence
  Synthetic oligonucleotide; TTT chr2 60457819 60457840 60457824 60457819 -
tttgttcctttttcctgctgcc

SEQ ID NO: 226472 - DNA, 22 bp, Artificial Sequence
  Synthetic oligonucleotide; TTT chr2 60457818 60457839 60457823 60457818 -
ttgttcctttttcctgctgcca

SEQ ID NO: 226473 - DNA, 22 bp, Artificial Sequence
  Synthetic oligonucleotide; TTT chr2 60457817 60457838 60457822 60457817 -
tgttcctttttcctgctgccat

SEQ ID NO: 226474 - DNA, 22 bp, Artificial Sequence
  Synthetic oligonucleotide; TTT chr2 60457816 60457837 60457821 60457816 -
gttcctttttcctgctgccata

SEQ ID NO: 226475 - DNA, 22 bp, Artificial Sequence
  Synthetic oligonucleotide; TTG chr2 60457815 60457836 60457820 60457815 -
ttcctttttcctgctgccatac

SEQ ID NO: 226476 - DNA, 22 bp, Artificial Sequence
  Synthetic oligonucleotide; TTC chr2 60457812 60457833 60457817 60457812 -
ctttttcctgctgccatactgt

SEQ ID NO: 226477 - DNA, 22 bp, Artificial Sequence
  Synthetic oligonucleotide; CTT chr2 60457809 60457830 60457814 60457809 -
tttcctgctgccatactgtatg

SEQ ID NO: 226478 - DNA, 22 bp, Artificial Sequence
  Synthetic oligonucleotide; TTT chr2 60457808 60457829 60457813 60457808 -
ttcctgctgccatactgtatgc

SEQ ID NO: 226479 - DNA, 22 bp, Artificial Sequence
  Synthetic oligonucleotide; TTT chr2 60457807 60457828 60457812 60457807 -
tcctgctgccatactgtatgca

SEQ ID NO: 226480 - DNA, 22 bp, Artificial Sequence
  Synthetic oligonucleotide; TTT chr2 60457806 60457827 60457811 60457806 -
cctgctgccatactgtatgcag

SEQ ID NO: 226481 - DNA, 22 bp, Artificial Sequence
  Synthetic oligonucleotide; TTC chr2 60457805 60457826 60457810 60457805 -
ctgctgccatactgtatgcagt

SEQ ID NO: 226482 - DNA, 22 bp, Artificial Sequence
  Synthetic oligonucleotide; CTG chr2 60457802 60457823 60457807 60457802 -
ctgccatactgtatgcagtact

SEQ ID NO: 226483 - DNA, 22 bp, Artificial Sequence
  Synthetic oligonucleotide; CTG chr2 60457799 60457820 60457804 60457799 -
ccatactgtatgcagtactgca

SEQ ID NO: 226484 - DNA, 22 bp, Artificial Sequence
  Synthetic oligonucleotide; CTG chr2 60457791 60457812 60457796 60457791 -
tatgcagtactgcaagctaata

SEQ ID NO: 226485 - DNA, 22 bp, Artificial Sequence
  Synthetic oligonucleotide; CTG chr2 60457779 60457800 60457784 60457779 -
caagctaataacgttggtttgt

SEQ ID NO: 226486 - DNA, 22 bp, Artificial Sequence
  Synthetic oligonucleotide; CTA chr2 60457772 60457793 60457777 60457772 -
ataacgttggtttgttatgtag

SEQ ID NO: 226487 - DNA, 22 bp, Artificial Sequence
  Synthetic oligonucleotide; TTG chr2 60457763 60457784 60457768 60457763 -
gtttgttatgtagtgtgctttt

SEQ ID NO: 226488 - DNA, 22 bp, Artificial Sequence
  Synthetic oligonucleotide; TTT chr2 60457759 60457780 60457764 60457759 -
gttatgtagtgtgctttttgtc

SEQ ID NO: 226489 - DNA, 22 bp, Artificial Sequence
  Synthetic oligonucleotide; TTG chr2 60457758 60457779 60457763 60457758 -
ttatgtagtgtgctttttgtcc

SEQ ID NO: 226490 - DNA, 22 bp, Artificial Sequence
  Synthetic oligonucleotide; TTA chr2 60457755 60457776 60457760 60457755 -
tgtagtgtgctttttgtccctt

SEQ ID NO: 226491 - DNA, 22 bp, Artificial Sequence
  Synthetic oligonucleotide; CTT chr2 60457743 60457764 60457748 60457743 -
tttgtccctttccttctatcac

SEQ ID NO: 226492 - DNA, 22 bp, Artificial Sequence
  Synthetic oligonucleotide; TTT chr2 60457742 60457763 60457747 60457742 -
ttgtccctttccttctatcacc

SEQ ID NO: 226493 - DNA, 22 bp, Artificial Sequence
  Synthetic oligonucleotide; TTT chr2 60457741 60457762 60457746 60457741 -
tgtccctttccttctatcaccc

SEQ ID NO: 226494 - DNA, 22 bp, Artificial Sequence
  Synthetic oligonucleotide; TTT chr2 60457740 60457761 60457745 60457740 -
gtccctttccttctatcaccct

SEQ ID NO: 226495 - DNA, 22 bp, Artificial Sequence
  Synthetic oligonucleotide; TTG chr2 60457739 60457760 60457744 60457739 -
tccctttccttctatcacccta

SEQ ID NO: 226496 - DNA, 22 bp, Artificial Sequence
  Synthetic oligonucleotide; CTT chr2 60457733 60457754 60457738 60457733 -
tccttctatcaccctacattcc

SEQ ID NO: 226497 - DNA, 22 bp, Artificial Sequence
  Synthetic oligonucleotide; TTT chr2 60457732 60457753 60457737 60457732 -
ccttctatcaccctacattcca

SEQ ID NO: 226498 - DNA, 22 bp, Artificial Sequence
  Synthetic oligonucleotide; TTC chr2 60457731 60457752 60457736 60457731 -
cttctatcaccctacattccag

SEQ ID NO: 226499 - DNA, 22 bp, Artificial Sequence
  Synthetic oligonucleotide; CTT chr2 60457728 60457749 60457733 60457728 -
ctatcaccctacattccagcat

SEQ ID NO: 226500 - DNA, 22 bp, Artificial Sequence
  Synthetic oligonucleotide; TTC chr2 60457727 60457748 60457732 60457727 -
tatcaccctacattccagcatc

SEQ ID NO: 226501 - DNA, 22 bp, Artificial Sequence
  Synthetic oligonucleotide; CTA chr2 60457725 60457746 60457730 60457725 -
tcaccctacattccagcatctt

SEQ ID NO: 226502 - DNA, 22 bp, Artificial Sequence
  Synthetic oligonucleotide; CTA chr2 60457717 60457738 60457722 60457717 -
cattccagcatcttaccttcat

SEQ ID NO: 226503 - DNA, 22 bp, Artificial Sequence
  Synthetic oligonucleotide; TTC chr2 60457712 60457733 60457717 60457712 -
cagcatcttaccttcatatgca

SEQ ID NO: 226504 - DNA, 22 bp, Artificial Sequence
  Synthetic oligonucleotide; CTT chr2 60457703 60457724 60457708 60457703 -
accttcatatgcagtaaaagaa

SEQ ID NO: 226505 - DNA, 22 bp, Artificial Sequence
  Synthetic oligonucleotide; TTA chr2 60457702 60457723 60457707 60457702 -
ccttcatatgcagtaaaagaaa

SEQ ID NO: 226506 - DNA, 22 bp, Artificial Sequence
  Synthetic oligonucleotide; CTT chr2 60457698 60457719 60457703 60457698 -
catatgcagtaaaagaaagaaa

SEQ ID NO: 226507 - DNA, 22 bp, Artificial Sequence
  Synthetic oligonucleotide; TTC chr2 60457697 60457718 60457702 60457697 -
atatgcagtaaaagaaagaaag

SEQ ID NO: 226508 - DNA, 22 bp, Artificial Sequence
  Synthetic oligonucleotide; TTT chr2 60457640 60457661 60457645 60457640 -
tgcagtttttttcattgccaaa

SEQ ID NO: 226509 - DNA, 22 bp, Artificial Sequence
  Synthetic oligonucleotide; TTT chr2 60457639 60457660 60457644 60457639 -
gcagtttttttcattgccaaaa

SEQ ID NO: 226510 - DNA, 22 bp, Artificial Sequence
  Synthetic oligonucleotide; TTG chr2 60457638 60457659 60457643 60457638 -
cagtttttttcattgccaaaaa

SEQ ID NO: 226511 - DNA, 22 bp, Artificial Sequence
  Synthetic oligonucleotide; TTT chr2 60457632 60457653 60457637 60457632 -
ttttcattgccaaaaactaaat

SEQ ID NO: 226512 - DNA, 22 bp, Artificial Sequence
  Synthetic oligonucleotide; TTT chr2 60457631 60457652 60457636 60457631 -
tttcattgccaaaaactaaatg

SEQ ID NO: 226513 - DNA, 22 bp, Artificial Sequence
  Synthetic oligonucleotide; TTT chr2 60457630 60457651 60457635 60457630 -
ttcattgccaaaaactaaatgg

SEQ ID NO: 226514 - DNA, 22 bp, Artificial Sequence
  Synthetic oligonucleotide; TTT chr2 60457629 60457650 60457634 60457629 -
tcattgccaaaaactaaatggt

SEQ ID NO: 226515 - DNA, 22 bp, Artificial Sequence
  Synthetic oligonucleotide; TTT chr2 60457628 60457649 60457633 60457628 -
cattgccaaaaactaaatggtg

SEQ ID NO: 226516 - DNA, 22 bp, Artificial Sequence
  Synthetic oligonucleotide; TTC chr2 60457627 60457648 60457632 60457627 -
attgccaaaaactaaatggtgc

SEQ ID NO: 226517 - DNA, 22 bp, Artificial Sequence
  Synthetic oligonucleotide; TTG chr2 60457623 60457644 60457628 60457623 -
ccaaaaactaaatggtgcttta

SEQ ID NO: 226518 - DNA, 22 bp, Artificial Sequence
  Synthetic oligonucleotide; CTA chr2 60457613 60457634 60457618 60457613 -
aatggtgctttatatttagatt

SEQ ID NO: 226519 - DNA, 22 bp, Artificial Sequence
  Synthetic oligonucleotide; CTT chr2 60457603 60457624 60457608 60457603 -
tatatttagattggaaagaatt

SEQ ID NO: 226520 - DNA, 22 bp, Artificial Sequence
  Synthetic oligonucleotide; TTT chr2 60457602 60457623 60457607 60457602 -
atatttagattggaaagaattt

SEQ ID NO: 226521 - DNA, 22 bp, Artificial Sequence
  Synthetic oligonucleotide; TTA chr2 60457601 60457622 60457606 60457601 -
tatttagattggaaagaatttc

SEQ ID NO: 226522 - DNA, 22 bp, Artificial Sequence
  Synthetic oligonucleotide; TTT chr2 60457596 60457617 60457601 60457596 -
agattggaaagaatttcatatg

SEQ ID NO: 226523 - DNA, 22 bp, Artificial Sequence
  Synthetic oligonucleotide; TTA chr2 60457595 60457616 60457600 60457595 -
gattggaaagaatttcatatgc

SEQ ID NO: 226524 - DNA, 22 bp, Artificial Sequence
  Synthetic oligonucleotide; TTG chr2 60457590 60457611 60457595 60457590 -
gaaagaatttcatatgcaaagc

SEQ ID NO: 226525 - DNA, 22 bp, Artificial Sequence
  Synthetic oligonucleotide; TTT chr2 60457580 60457601 60457585 60457580 -
catatgcaaagcatattaaaga

SEQ ID NO: 226526 - DNA, 22 bp, Artificial Sequence
  Synthetic oligonucleotide; TTC chr2 60457579 60457600 60457584 60457579 -
atatgcaaagcatattaaagag

SEQ ID NO: 226527 - DNA, 22 bp, Artificial Sequence
  Synthetic oligonucleotide; TTA chr2 60457562 60457583 60457567 60457562 -
aagagaaagcccgctttagtca

SEQ ID NO: 226528 - DNA, 22 bp, Artificial Sequence
  Synthetic oligonucleotide; CTT chr2 60457546 60457567 60457551 60457546 -
tagtcaatacttttttgtaaat

SEQ ID NO: 226529 - DNA, 22 bp, Artificial Sequence
  Synthetic oligonucleotide; TTT chr2 60457545 60457566 60457550 60457545 -
agtcaatacttttttgtaaatg

SEQ ID NO: 226530 - DNA, 22 bp, Artificial Sequence
  Synthetic oligonucleotide; TTA chr2 60457544 60457565 60457549 60457544 -
gtcaatacttttttgtaaatgg

SEQ ID NO: 226531 - DNA, 22 bp, Artificial Sequence
  Synthetic oligonucleotide; CTT chr2 60457534 60457555 60457539 60457534 -
ttttgtaaatggcaatgcagaa

SEQ ID NO: 226532 - DNA, 22 bp, Artificial Sequence
  Synthetic oligonucleotide; TTT chr2 60457533 60457554 60457538 60457533 -
tttgtaaatggcaatgcagaat

SEQ ID NO: 226533 - DNA, 22 bp, Artificial Sequence
  Synthetic oligonucleotide; TTT chr2 60457532 60457553 60457537 60457532 -
ttgtaaatggcaatgcagaata

SEQ ID NO: 226534 - DNA, 22 bp, Artificial Sequence
  Synthetic oligonucleotide; TTT chr2 60457531 60457552 60457536 60457531 -
tgtaaatggcaatgcagaatat

SEQ ID NO: 226535 - DNA, 22 bp, Artificial Sequence
  Synthetic oligonucleotide; TTT chr2 60457530 60457551 60457535 60457530 -
gtaaatggcaatgcagaatatt

SEQ ID NO: 226536 - DNA, 22 bp, Artificial Sequence
  Synthetic oligonucleotide; TTG chr2 60457529 60457550 60457534 60457529 -
taaatggcaatgcagaatattt

SEQ ID NO: 226537 - DNA, 22 bp, Artificial Sequence
  Synthetic oligonucleotide; TTT chr2 60457507 60457528 60457512 60457507 -
tgttattggccttttctattcc

SEQ ID NO: 226538 - DNA, 22 bp, Artificial Sequence
  Synthetic oligonucleotide; TTT chr2 60457506 60457527 60457511 60457506 -
gttattggccttttctattcct

SEQ ID NO: 226539 - DNA, 22 bp, Artificial Sequence
  Synthetic oligonucleotide; TTG chr2 60457505 60457526 60457510 60457505 -
ttattggccttttctattcctg

SEQ ID NO: 226540 - DNA, 22 bp, Artificial Sequence
  Synthetic oligonucleotide; TTA chr2 60457502 60457523 60457507 60457502 -
ttggccttttctattcctgtaa

SEQ ID NO: 226541 - DNA, 22 bp, Artificial Sequence
  Synthetic oligonucleotide; TTG chr2 60457499 60457520 60457504 60457499 -
gccttttctattcctgtaatga

SEQ ID NO: 226542 - DNA, 22 bp, Artificial Sequence
  Synthetic oligonucleotide; CTT chr2 60457494 60457515 60457499 60457494 -
ttctattcctgtaatgaaagct

SEQ ID NO: 226543 - DNA, 22 bp, Artificial Sequence
  Synthetic oligonucleotide; TTT chr2 60457493 60457514 60457498 60457493 -
tctattcctgtaatgaaagctg

SEQ ID NO: 226544 - DNA, 22 bp, Artificial Sequence
  Synthetic oligonucleotide; TTT chr2 60457492 60457513 60457497 60457492 -
ctattcctgtaatgaaagctgt

SEQ ID NO: 226545 - DNA, 22 bp, Artificial Sequence
  Synthetic oligonucleotide; TTC chr2 60457491 60457512 60457496 60457491 -
tattcctgtaatgaaagctgtt

SEQ ID NO: 226546 - DNA, 22 bp, Artificial Sequence
  Synthetic oligonucleotide; CTA chr2 60457489 60457510 60457494 60457489 -
ttcctgtaatgaaagctgtttg

SEQ ID NO: 226547 - DNA, 22 bp, Artificial Sequence
  Synthetic oligonucleotide; TTC chr2 60457486 60457507 60457491 60457486 -
ctgtaatgaaagctgtttgtcg

SEQ ID NO: 226548 - DNA, 22 bp, Artificial Sequence
  Synthetic oligonucleotide; CTG chr2 60457483 60457504 60457488 60457483 -
taatgaaagctgtttgtcgtaa

SEQ ID NO: 226549 - DNA, 22 bp, Artificial Sequence
  Synthetic oligonucleotide; CTG chr2 60457471 60457492 60457476 60457471 -
tttgtcgtaacttgaaatttta

SEQ ID NO: 226550 - DNA, 22 bp, Artificial Sequence
  Synthetic oligonucleotide; TTT chr2 60457468 60457489 60457473 60457468 -
gtcgtaacttgaaattttatct

SEQ ID NO: 226551 - DNA, 22 bp, Artificial Sequence
  Synthetic oligonucleotide; TTG chr2 60457467 60457488 60457472 60457467 -
tcgtaacttgaaattttatctt

SEQ ID NO: 226552 - DNA, 22 bp, Artificial Sequence
  Synthetic oligonucleotide; CTT chr2 60457458 60457479 60457463 60457458 -
gaaattttatcttttactatgg

SEQ ID NO: 226553 - DNA, 22 bp, Artificial Sequence
  Synthetic oligonucleotide; TTG chr2 60457457 60457478 60457462 60457457 -
aaattttatcttttactatggg

SEQ ID NO: 226554 - DNA, 22 bp, Artificial Sequence
  Synthetic oligonucleotide; TTT chr2 60457451 60457472 60457456 60457451 -
tatcttttactatgggagtcac

SEQ ID NO: 226555 - DNA, 22 bp, Artificial Sequence
  Synthetic oligonucleotide; TTT chr2 60457450 60457471 60457455 60457450 -
atcttttactatgggagtcact

SEQ ID NO: 226556 - DNA, 22 bp, Artificial Sequence
  Synthetic oligonucleotide; TTA chr2 60457449 60457470 60457454 60457449 -
tcttttactatgggagtcacta

SEQ ID NO: 226557 - DNA, 22 bp, Artificial Sequence
  Synthetic oligonucleotide; CTT chr2 60457445 60457466 60457450 60457445 -
ttactatgggagtcactattta

SEQ ID NO: 226558 - DNA, 22 bp, Artificial Sequence
  Synthetic oligonucleotide; TTT chr2 60457444 60457465 60457449 60457444 -
tactatgggagtcactatttat

SEQ ID NO: 226559 - DNA, 22 bp, Artificial Sequence
  Synthetic oligonucleotide; TTT chr2 60457443 60457464 60457448 60457443 -
actatgggagtcactatttatt

SEQ ID NO: 226560 - DNA, 22 bp, Artificial Sequence
  Synthetic oligonucleotide; TTA chr2 60457442 60457463 60457447 60457442 -
ctatgggagtcactatttatta

SEQ ID NO: 226561 - DNA, 22 bp, Artificial Sequence
  Synthetic oligonucleotide; CTA chr2 60457439 60457460 60457444 60457439 -
tgggagtcactatttattattg

SEQ ID NO: 226562 - DNA, 22 bp, Artificial Sequence
  Synthetic oligonucleotide; CTA chr2 60457427 60457448 60457432 60457427 -
tttattattgcttatgtgccct

SEQ ID NO: 226563 - DNA, 22 bp, Artificial Sequence
  Synthetic oligonucleotide; TTT chr2 60457424 60457445 60457429 60457424 -
attattgcttatgtgccctgtt

SEQ ID NO: 226564 - DNA, 22 bp, Artificial Sequence
  Synthetic oligonucleotide; TTA chr2 60457423 60457444 60457428 60457423 -
ttattgcttatgtgccctgttc

SEQ ID NO: 226565 - DNA, 22 bp, Artificial Sequence
  Synthetic oligonucleotide; TTA chr2 60457420 60457441 60457425 60457420 -
ttgcttatgtgccctgttcaaa

SEQ ID NO: 226566 - DNA, 22 bp, Artificial Sequence
  Synthetic oligonucleotide; TTG chr2 60457417 60457438 60457422 60457417 -
cttatgtgccctgttcaaaaca

SEQ ID NO: 226567 - DNA, 22 bp, Artificial Sequence
  Synthetic oligonucleotide; CTT chr2 60457414 60457435 60457419 60457414 -
atgtgccctgttcaaaacagag

SEQ ID NO: 226568 - DNA, 22 bp, Artificial Sequence
  Synthetic oligonucleotide; TTA chr2 60457413 60457434 60457418 60457413 -
tgtgccctgttcaaaacagagg

SEQ ID NO: 226569 - DNA, 22 bp, Artificial Sequence
  Synthetic oligonucleotide; CTG chr2 60457404 60457425 60457409 60457404 -
ttcaaaacagaggcacttaatt

SEQ ID NO: 226570 - DNA, 22 bp, Artificial Sequence
  Synthetic oligonucleotide; TTC chr2 60457401 60457422 60457406 60457401 -
aaaacagaggcacttaatttga

SEQ ID NO: 226571 - DNA, 22 bp, Artificial Sequence
  Synthetic oligonucleotide; CTT chr2 60457386 60457407 60457391 60457386 -
aatttgatcttttatttttctt

SEQ ID NO: 226572 - DNA, 22 bp, Artificial Sequence
  Synthetic oligonucleotide; TTA chr2 60457385 60457406 60457390 60457385 -
atttgatcttttatttttcttt

SEQ ID NO: 226573 - DNA, 22 bp, Artificial Sequence
  Synthetic oligonucleotide; TTT chr2 60457381 60457402 60457386 60457381 -
gatcttttatttttctttgttt

SEQ ID NO: 226574 - DNA, 22 bp, Artificial Sequence
  Synthetic oligonucleotide; TTG chr2 60457380 60457401 60457385 60457380 -
atcttttatttttctttgtttt

SEQ ID NO: 226575 - DNA, 22 bp, Artificial Sequence
  Synthetic oligonucleotide; CTT chr2 60457375 60457396 60457380 60457375 -
ttatttttctttgtttttattt

SEQ ID NO: 226576 - DNA, 22 bp, Artificial Sequence
  Synthetic oligonucleotide; TTT chr2 60457374 60457395 60457379 60457374 -
tatttttctttgtttttatttt

SEQ ID NO: 226577 - DNA, 22 bp, Artificial Sequence
  Synthetic oligonucleotide; TTT chr2 60457373 60457394 60457378 60457373 -
atttttctttgtttttattttt

SEQ ID NO: 226578 - DNA, 22 bp, Artificial Sequence
  Synthetic oligonucleotide; TTA chr2 60457372 60457393 60457377 60457372 -
tttttctttgtttttatttttt

SEQ ID NO: 226579 - DNA, 22 bp, Artificial Sequence
  Synthetic oligonucleotide; TTT chr2 60457369 60457390 60457374 60457369 -
ttctttgtttttattttttttt

SEQ ID NO: 226580 - DNA, 22 bp, Artificial Sequence
  Synthetic oligonucleotide; TTT chr2 60457368 60457389 60457373 60457368 -
tctttgtttttatttttttttt

SEQ ID NO: 226581 - DNA, 22 bp, Artificial Sequence
  Synthetic oligonucleotide; TTT chr2 60457367 60457388 60457372 60457367 -
ctttgtttttattttttttttt

SEQ ID NO: 226582 - DNA, 22 bp, Artificial Sequence
  Synthetic oligonucleotide; TTC chr2 60457366 60457387 60457371 60457366 -
tttgtttttattttttttttta

SEQ ID NO: 226583 - DNA, 22 bp, Artificial Sequence
  Synthetic oligonucleotide; CTT chr2 60457364 60457385 60457369 60457364 -
tgtttttatttttttttttatt

SEQ ID NO: 226584 - DNA, 22 bp, Artificial Sequence
  Synthetic oligonucleotide; TTT chr2 60457363 60457384 60457368 60457363 -
gtttttatttttttttttattt

SEQ ID NO: 226585 - DNA, 22 bp, Artificial Sequence
  Synthetic oligonucleotide; TTG chr2 60457362 60457383 60457367 60457362 -
tttttatttttttttttattta

SEQ ID NO: 226586 - DNA, 22 bp, Artificial Sequence
  Synthetic oligonucleotide; TTT chr2 60457359 60457380 60457364 60457359 -
ttatttttttttttatttagat

SEQ ID NO: 226587 - DNA, 22 bp, Artificial Sequence
  Synthetic oligonucleotide; TTT chr2 60457358 60457379 60457363 60457358 -
tatttttttttttatttagatg

SEQ ID NO: 226588 - DNA, 22 bp, Artificial Sequence
  Synthetic oligonucleotide; TTT chr2 60457357 60457378 60457362 60457357 -
atttttttttttatttagatga

SEQ ID NO: 226589 - DNA, 22 bp, Artificial Sequence
  Synthetic oligonucleotide; TTA chr2 60457356 60457377 60457361 60457356 -
tttttttttttatttagatgac

SEQ ID NO: 226590 - DNA, 22 bp, Artificial Sequence
  Synthetic oligonucleotide; TTT chr2 60457353 60457374 60457358 60457353 -
ttttttttatttagatgaccaa

SEQ ID NO: 226591 - DNA, 22 bp, Artificial Sequence
  Synthetic oligonucleotide; TTT chr2 60457352 60457373 60457357 60457352 -
tttttttatttagatgaccaaa

SEQ ID NO: 226592 - DNA, 22 bp, Artificial Sequence
  Synthetic oligonucleotide; TTT chr2 60457351 60457372 60457356 60457351 -
ttttttatttagatgaccaaag

SEQ ID NO: 226593 - DNA, 22 bp, Artificial Sequence
  Synthetic oligonucleotide; TTT chr2 60457350 60457371 60457355 60457350 -
tttttatttagatgaccaaagg

SEQ ID NO: 226594 - DNA, 22 bp, Artificial Sequence
  Synthetic oligonucleotide; TTT chr2 60457349 60457370 60457354 60457349 -
ttttatttagatgaccaaaggt

SEQ ID NO: 226595 - DNA, 22 bp, Artificial Sequence
  Synthetic oligonucleotide; TTT chr2 60457348 60457369 60457353 60457348 -
tttatttagatgaccaaaggtc

SEQ ID NO: 226596 - DNA, 22 bp, Artificial Sequence
  Synthetic oligonucleotide; TTT chr2 60457347 60457368 60457352 60457347 -
ttatttagatgaccaaaggtca

SEQ ID NO: 226597 - DNA, 22 bp, Artificial Sequence
  Synthetic oligonucleotide; TTT chr2 60457346 60457367 60457351 60457346 -
tatttagatgaccaaaggtcat

SEQ ID NO: 226598 - DNA, 22 bp, Artificial Sequence
  Synthetic oligonucleotide; TTT chr2 60457345 60457366 60457350 60457345 -
atttagatgaccaaaggtcatt

SEQ ID NO: 226599 - DNA, 22 bp, Artificial Sequence
  Synthetic oligonucleotide; TTA chr2 60457344 60457365 60457349 60457344 -
tttagatgaccaaaggtcatta

SEQ ID NO: 226600 - DNA, 22 bp, Artificial Sequence
  Synthetic oligonucleotide; TTT chr2 60457341 60457362 60457346 60457341 -
agatgaccaaaggtcattacaa

SEQ ID NO: 226601 - DNA, 22 bp, Artificial Sequence
  Synthetic oligonucleotide; TTA chr2 60457340 60457361 60457345 60457340 -
gatgaccaaaggtcattacaac

SEQ ID NO: 226602 - DNA, 22 bp, Artificial Sequence
  Synthetic oligonucleotide; TTA chr2 60457322 60457343 60457327 60457322 -
caacctggctttttattgtatt

SEQ ID NO: 226603 - DNA, 22 bp, Artificial Sequence
  Synthetic oligonucleotide; CTG chr2 60457315 60457336 60457320 60457315 -
gctttttattgtatttgtttct

SEQ ID NO: 226604 - DNA, 22 bp, Artificial Sequence
  Synthetic oligonucleotide; CTT chr2 60457311 60457332 60457316 60457311 -
tttattgtatttgtttctggtc

SEQ ID NO: 226605 - DNA, 22 bp, Artificial Sequence
  Synthetic oligonucleotide; TTT chr2 60457310 60457331 60457315 60457310 -
ttattgtatttgtttctggtct

SEQ ID NO: 226606 - DNA, 22 bp, Artificial Sequence
  Synthetic oligonucleotide; TTT chr2 60457309 60457330 60457314 60457309 -
tattgtatttgtttctggtctt

SEQ ID NO: 226607 - DNA, 22 bp, Artificial Sequence
  Synthetic oligonucleotide; TTT chr2 60457308 60457329 60457313 60457308 -
attgtatttgtttctggtcttt

SEQ ID NO: 226608 - DNA, 22 bp, Artificial Sequence
  Synthetic oligonucleotide; TTA chr2 60457307 60457328 60457312 60457307 -
ttgtatttgtttctggtctttg

SEQ ID NO: 226609 - DNA, 22 bp, Artificial Sequence
  Synthetic oligonucleotide; TTG chr2 60457304 60457325 60457309 60457304 -
tatttgtttctggtctttgtta

SEQ ID NO: 226610 - DNA, 22 bp, Artificial Sequence
  Synthetic oligonucleotide; TTT chr2 60457299 60457320 60457304 60457299 -
gtttctggtctttgttaagttc

SEQ ID NO: 226611 - DNA, 22 bp, Artificial Sequence
  Synthetic oligonucleotide; TTG chr2 60457298 60457319 60457303 60457298 -
tttctggtctttgttaagttct

SEQ ID NO: 226612 - DNA, 22 bp, Artificial Sequence
  Synthetic oligonucleotide; TTT chr2 60457295 60457316 60457300 60457295 -
ctggtctttgttaagttctatt

SEQ ID NO: 226613 - DNA, 22 bp, Artificial Sequence
  Synthetic oligonucleotide; TTC chr2 60457294 60457315 60457299 60457294 -
tggtctttgttaagttctattg

SEQ ID NO: 226614 - DNA, 22 bp, Artificial Sequence
  Synthetic oligonucleotide; CTG chr2 60457292 60457313 60457297 60457292 -
gtctttgttaagttctattgga

SEQ ID NO: 226615 - DNA, 22 bp, Artificial Sequence
  Synthetic oligonucleotide; CTT chr2 60457287 60457308 60457292 60457287 -
tgttaagttctattggaaaaac

SEQ ID NO: 226616 - DNA, 22 bp, Artificial Sequence
  Synthetic oligonucleotide; TTT chr2 60457286 60457307 60457291 60457286 -
gttaagttctattggaaaaacc

SEQ ID NO: 226617 - DNA, 22 bp, Artificial Sequence
  Synthetic oligonucleotide; TTG chr2 60457285 60457306 60457290 60457285 -
ttaagttctattggaaaaacca

SEQ ID NO: 226618 - DNA, 22 bp, Artificial Sequence
  Synthetic oligonucleotide; TTA chr2 60457282 60457303 60457287 60457282 -
agttctattggaaaaaccactg

SEQ ID NO: 226619 - DNA, 22 bp, Artificial Sequence
  Synthetic oligonucleotide; TTC chr2 60457277 60457298 60457282 60457277 -
tattggaaaaaccactgtctgt

SEQ ID NO: 226620 - DNA, 22 bp, Artificial Sequence
  Synthetic oligonucleotide; CTA chr2 60457275 60457296 60457280 60457275 -
ttggaaaaaccactgtctgtgt

SEQ ID NO: 226621 - DNA, 22 bp, Artificial Sequence
  Synthetic oligonucleotide; TTG chr2 60457272 60457293 60457277 60457272 -
gaaaaaccactgtctgtgtttt

SEQ ID NO: 226622 - DNA, 22 bp, Artificial Sequence
  Synthetic oligonucleotide; CTG chr2 60457260 60457281 60457265 60457260 -
tctgtgtttttttggcagttgt

SEQ ID NO: 226623 - DNA, 22 bp, Artificial Sequence
  Synthetic oligonucleotide; CTG chr2 60457256 60457277 60457261 60457256 -
tgtttttttggcagttgtctgc

SEQ ID NO: 226624 - DNA, 22 bp, Artificial Sequence
  Synthetic oligonucleotide; TTT chr2 60457251 60457272 60457256 60457251 -
ttttggcagttgtctgcattaa

SEQ ID NO: 226625 - DNA, 22 bp, Artificial Sequence
  Synthetic oligonucleotide; TTT chr2 60457250 60457271 60457255 60457250 -
tttggcagttgtctgcattaac

SEQ ID NO: 226626 - DNA, 22 bp, Artificial Sequence
  Synthetic oligonucleotide; TTT chr2 60457249 60457270 60457254 60457249 -
ttggcagttgtctgcattaacc

SEQ ID NO: 226627 - DNA, 22 bp, Artificial Sequence
  Synthetic oligonucleotide; TTT chr2 60457248 60457269 60457253 60457248 -
tggcagttgtctgcattaacct

SEQ ID NO: 226628 - DNA, 22 bp, Artificial Sequence
  Synthetic oligonucleotide; TTT chr2 60457247 60457268 60457252 60457247 -
ggcagttgtctgcattaacctg

SEQ ID NO: 226629 - DNA, 22 bp, Artificial Sequence
  Synthetic oligonucleotide; TTG chr2 60457246 60457267 60457251 60457246 -
gcagttgtctgcattaacctgt

SEQ ID NO: 226630 - DNA, 22 bp, Artificial Sequence
  Synthetic oligonucleotide; TTG chr2 60457239 60457260 60457244 60457239 -
tctgcattaacctgttcataca

SEQ ID NO: 226631 - DNA, 22 bp, Artificial Sequence
  Synthetic oligonucleotide; CTG chr2 60457235 60457256 60457240 60457235 -
cattaacctgttcatacaccca

SEQ ID NO: 226632 - DNA, 22 bp, Artificial Sequence
  Synthetic oligonucleotide; TTA chr2 60457230 60457251 60457235 60457230 -
acctgttcatacacccattttg

SEQ ID NO: 226633 - DNA, 22 bp, Artificial Sequence
  Synthetic oligonucleotide; CTG chr2 60457225 60457246 60457230 60457225 -
ttcatacacccattttgtccct

SEQ ID NO: 226634 - DNA, 22 bp, Artificial Sequence
  Synthetic oligonucleotide; TTC chr2 60457222 60457243 60457227 60457222 -
atacacccattttgtcccttta

SEQ ID NO: 226635 - DNA, 22 bp, Artificial Sequence
  Synthetic oligonucleotide; TTT chr2 60457210 60457231 60457215 60457210 -
tgtccctttattgaaaaaataa

SEQ ID NO: 226636 - DNA, 22 bp, Artificial Sequence
  Synthetic oligonucleotide; TTT chr2 60457209 60457230 60457214 60457209 -
gtccctttattgaaaaaataaa

SEQ ID NO: 226637 - DNA, 22 bp, Artificial Sequence
  Synthetic oligonucleotide; TTG chr2 60457208 60457229 60457213 60457208 -
tccctttattgaaaaaataaaa

SEQ ID NO: 226638 - DNA, 22 bp, Artificial Sequence
  Synthetic oligonucleotide; CTT chr2 60457202 60457223 60457207 60457202 -
tattgaaaaaataaaaaaaatt

SEQ ID NO: 226639 - DNA, 22 bp, Artificial Sequence
  Synthetic oligonucleotide; TTT chr2 60457201 60457222 60457206 60457201 -
attgaaaaaataaaaaaaatta

SEQ ID NO: 226640 - DNA, 22 bp, Artificial Sequence
  Synthetic oligonucleotide; TTA chr2 60457200 60457221 60457205 60457200 -
ttgaaaaaataaaaaaaattaa

SEQ ID NO: 226641 - DNA, 22 bp, Artificial Sequence
  Synthetic oligonucleotide; TTG chr2 60457197 60457218 60457202 60457197 -
aaaaaataaaaaaaattaaagt

SEQ ID NO: 226642 - DNA, 22 bp, Artificial Sequence
  Synthetic oligonucleotide; TTA chr2 60457179 60457200 60457184 60457179 -
aagtacacattgtaagcttctt

SEQ ID NO: 226643 - DNA, 22 bp, Artificial Sequence
  Synthetic oligonucleotide; TTG chr2 60457167 60457188 60457172 60457167 -
taagcttcttgtgtcctcattt

SEQ ID NO: 226644 - DNA, 22 bp, Artificial Sequence
  Synthetic oligonucleotide; CTT chr2 60457160 60457181 60457165 60457160 -
cttgtgtcctcatttgacacac

SEQ ID NO: 226645 - DNA, 22 bp, Artificial Sequence
  Synthetic oligonucleotide; TTC chr2 60457159 60457180 60457164 60457159 -
ttgtgtcctcatttgacacact

SEQ ID NO: 226646 - DNA, 22 bp, Artificial Sequence
  Synthetic oligonucleotide; CTT chr2 60457157 60457178 60457162 60457157 -
gtgtcctcatttgacacactct

SEQ ID NO: 226647 - DNA, 22 bp, Artificial Sequence
  Synthetic oligonucleotide; TTG chr2 60457156 60457177 60457161 60457156 -
tgtcctcatttgacacactctg

SEQ ID NO: 226648 - DNA, 22 bp, Artificial Sequence
  Synthetic oligonucleotide; CTC chr2 60457149 60457170 60457154 60457149 -
atttgacacactctgtaaatta

SEQ ID NO: 226649 - DNA, 22 bp, Artificial Sequence
  Synthetic oligonucleotide; TTT chr2 60457145 60457166 60457150 60457145 -
gacacactctgtaaattacttg

SEQ ID NO: 226650 - DNA, 22 bp, Artificial Sequence
  Synthetic oligonucleotide; TTG chr2 60457144 60457165 60457149 60457144 -
acacactctgtaaattacttgc

SEQ ID NO: 226651 - DNA, 22 bp, Artificial Sequence
  Synthetic oligonucleotide; CTC chr2 60457136 60457157 60457141 60457136 -
tgtaaattacttgcaagaaaat

SEQ ID NO: 226652 - DNA, 22 bp, Artificial Sequence
  Synthetic oligonucleotide; CTG chr2 60457134 60457155 60457139 60457134 -
taaattacttgcaagaaaataa

SEQ ID NO: 226653 - DNA, 22 bp, Artificial Sequence
  Synthetic oligonucleotide; TTA chr2 60457127 60457148 60457132 60457127 -
cttgcaagaaaataacaggttt

SEQ ID NO: 226654 - DNA, 22 bp, Artificial Sequence
  Synthetic oligonucleotide; CTT chr2 60457124 60457145 60457129 60457124 -
gcaagaaaataacaggttttaa

SEQ ID NO: 226655 - DNA, 22 bp, Artificial Sequence
  Synthetic oligonucleotide; TTG chr2 60457123 60457144 60457128 60457123 -
caagaaaataacaggttttaag

SEQ ID NO: 226656 - DNA, 22 bp, Artificial Sequence
  Synthetic oligonucleotide; TTT chr2 60457105 60457126 60457110 60457105 -
taagagaaggccagtcagtctt

SEQ ID NO: 226657 - DNA, 22 bp, Artificial Sequence
  Synthetic oligonucleotide; TTT chr2 60457104 60457125 60457109 60457104 -
aagagaaggccagtcagtcttt

SEQ ID NO: 226658 - DNA, 22 bp, Artificial Sequence
  Synthetic oligonucleotide; TTA chr2 60457103 60457124 60457108 60457103 -
agagaaggccagtcagtctttt

SEQ ID NO: 226659 - DNA, 22 bp, Artificial Sequence
  Synthetic oligonucleotide; CTT chr2 60457083 60457104 60457088 60457083 -
tttcaggattatttctatgggc

SEQ ID NO: 226660 - DNA, 22 bp, Artificial Sequence
  Synthetic oligonucleotide; TTT chr2 60457082 60457103 60457087 60457082 -
ttcaggattatttctatgggca

SEQ ID NO: 226661 - DNA, 22 bp, Artificial Sequence
  Synthetic oligonucleotide; TTT chr2 60457081 60457102 60457086 60457081 -
tcaggattatttctatgggcat

SEQ ID NO: 226662 - DNA, 22 bp, Artificial Sequence
  Synthetic oligonucleotide; TTT chr2 60457080 60457101 60457085 60457080 -
caggattatttctatgggcatt

SEQ ID NO: 226663 - DNA, 22 bp, Artificial Sequence
  Synthetic oligonucleotide; TTC chr2 60457079 60457100 60457084 60457079 -
aggattatttctatgggcattc

SEQ ID NO: 226664 - DNA, 22 bp, Artificial Sequence
  Synthetic oligonucleotide; TTA chr2 60457072 60457093 60457077 60457072 -
tttctatgggcattctgatgcg

SEQ ID NO: 226665 - DNA, 22 bp, Artificial Sequence
  Synthetic oligonucleotide; TTT chr2 60457069 60457090 60457074 60457069 -
ctatgggcattctgatgcgtgt

SEQ ID NO: 226666 - DNA, 22 bp, Artificial Sequence
  Synthetic oligonucleotide; TTC chr2 60457068 60457089 60457073 60457068 -
tatgggcattctgatgcgtgta

SEQ ID NO: 226667 - DNA, 22 bp, Artificial Sequence
  Synthetic oligonucleotide; CTA chr2 60457066 60457087 60457071 60457066 -
tgggcattctgatgcgtgtatt

SEQ ID NO: 226668 - DNA, 22 bp, Artificial Sequence
  Synthetic oligonucleotide; TTC chr2 60457057 60457078 60457062 60457057 -
tgatgcgtgtattataccctaa

SEQ ID NO: 226669 - DNA, 22 bp, Artificial Sequence
  Synthetic oligonucleotide; CTG chr2 60457055 60457076 60457060 60457055 -
atgcgtgtattataccctaaag

SEQ ID NO: 226670 - DNA, 22 bp, Artificial Sequence
  Synthetic oligonucleotide; TTA chr2 60457043 60457064 60457048 60457043 -
taccctaaaggaacataaagta

SEQ ID NO: 226671 - DNA, 22 bp, Artificial Sequence
  Synthetic oligonucleotide; CTA chr2 60457036 60457057 60457041 60457036 -
aaggaacataaagtacttacta

SEQ ID NO: 226672 - DNA, 22 bp, Artificial Sequence
  Synthetic oligonucleotide; CTT chr2 60457018 60457039 60457023 60457018 -
actatattaaaatagacatatc

SEQ ID NO: 226673 - DNA, 22 bp, Artificial Sequence
  Synthetic oligonucleotide; TTA chr2 60457017 60457038 60457022 60457017 -
ctatattaaaatagacatatct

SEQ ID NO: 226674 - DNA, 22 bp, Artificial Sequence
  Synthetic oligonucleotide; CTA chr2 60457014 60457035 60457019 60457014 -
tattaaaatagacatatctcaa

SEQ ID NO: 226675 - DNA, 22 bp, Artificial Sequence
  Synthetic oligonucleotide; TTA chr2 60457009 60457030 60457014 60457009 -
aaatagacatatctcaaaccct

SEQ ID NO: 226676 - DNA, 22 bp, Artificial Sequence
  Synthetic oligonucleotide; CTC chr2 60456994 60457015 60456999 60456994 -
aaaccctggacatagttttaag

SEQ ID NO: 226677 - DNA, 22 bp, Artificial Sequence
  Synthetic oligonucleotide; CTG chr2 60456986 60457007 60456991 60456986 -
gacatagttttaaggctttcca

SEQ ID NO: 226678 - DNA, 22 bp, Artificial Sequence
  Synthetic oligonucleotide; TTT chr2 60456976 60456997 60456981 60456976 -
taaggctttccagtttagaata

SEQ ID NO: 226679 - DNA, 22 bp, Artificial Sequence
  Synthetic oligonucleotide; TTT chr2 60456975 60456996 60456980 60456975 -
aaggctttccagtttagaatag

SEQ ID NO: 226680 - DNA, 22 bp, Artificial Sequence
  Synthetic oligonucleotide; TTA chr2 60456974 60456995 60456979 60456974 -
aggctttccagtttagaatagt

SEQ ID NO: 226681 - DNA, 22 bp, Artificial Sequence
  Synthetic oligonucleotide; CTT chr2 60456968 60456989 60456973 60456968 -
tccagtttagaatagttttcaa

SEQ ID NO: 226682 - DNA, 22 bp, Artificial Sequence
  Synthetic oligonucleotide; TTT chr2 60456967 60456988 60456972 60456967 -
ccagtttagaatagttttcaag

SEQ ID NO: 226683 - DNA, 22 bp, Artificial Sequence
  Synthetic oligonucleotide; TTC chr2 60456966 60456987 60456971 60456966 -
cagtttagaatagttttcaaga

SEQ ID NO: 226684 - DNA, 22 bp, Artificial Sequence
  Synthetic oligonucleotide; TTT chr2 60456960 60456981 60456965 60456960 -
agaatagttttcaagaaatgga

SEQ ID NO: 226685 - DNA, 22 bp, Artificial Sequence
  Synthetic oligonucleotide; TTA chr2 60456959 60456980 60456964 60456959 -
gaatagttttcaagaaatggaa

SEQ ID NO: 226686 - DNA, 22 bp, Artificial Sequence
  Synthetic oligonucleotide; TTT chr2 60456950 60456971 60456955 60456950 -
tcaagaaatggaaggtgttttc

SEQ ID NO: 226687 - DNA, 22 bp, Artificial Sequence
  Synthetic oligonucleotide; TTT chr2 60456949 60456970 60456954 60456949 -
caagaaatggaaggtgttttca

SEQ ID NO: 226688 - DNA, 22 bp, Artificial Sequence
  Synthetic oligonucleotide; TTC chr2 60456948 60456969 60456953 60456948 -
aagaaatggaaggtgttttcag

SEQ ID NO: 226689 - DNA, 22 bp, Artificial Sequence
  Synthetic oligonucleotide; TTT chr2 60456930 60456951 60456935 60456930 -
tcagtctgatgttaaaaactta

SEQ ID NO: 226690 - DNA, 22 bp, Artificial Sequence
  Synthetic oligonucleotide; TTT chr2 60456929 60456950 60456934 60456929 -
cagtctgatgttaaaaacttac

SEQ ID NO: 226691 - DNA, 22 bp, Artificial Sequence
  Synthetic oligonucleotide; TTC chr2 60456928 60456949 60456933 60456928 -
agtctgatgttaaaaacttact

SEQ ID NO: 226692 - DNA, 22 bp, Artificial Sequence
  Synthetic oligonucleotide; CTG chr2 60456922 60456943 60456927 60456922 -
atgttaaaaacttactccatct

SEQ ID NO: 226693 - DNA, 22 bp, Artificial Sequence
  Synthetic oligonucleotide; TTA chr2 60456916 60456937 60456921 60456916 -
aaaacttactccatctcttagc

SEQ ID NO: 226694 - DNA, 22 bp, Artificial Sequence
  Synthetic oligonucleotide; CTT chr2 60456909 60456930 60456914 60456909 -
actccatctcttagcagaaatc

SEQ ID NO: 226695 - DNA, 22 bp, Artificial Sequence
  Synthetic oligonucleotide; TTA chr2 60456908 60456929 60456913 60456908 -
ctccatctcttagcagaaatcc

SEQ ID NO: 226696 - DNA, 22 bp, Artificial Sequence
  Synthetic oligonucleotide; CTC chr2 60456905 60456926 60456910 60456905 -
catctcttagcagaaatccatt

SEQ ID NO: 226697 - DNA, 22 bp, Artificial Sequence
  Synthetic oligonucleotide; CTC chr2 60456899 60456920 60456904 60456899 -
ttagcagaaatccattcaaaca

SEQ ID NO: 226698 - DNA, 22 bp, Artificial Sequence
  Synthetic oligonucleotide; CTT chr2 60456897 60456918 60456902 60456897 -
agcagaaatccattcaaacata

SEQ ID NO: 226699 - DNA, 22 bp, Artificial Sequence
  Synthetic oligonucleotide; TTA chr2 60456896 60456917 60456901 60456896 -
gcagaaatccattcaaacataa

SEQ ID NO: 226700 - DNA, 22 bp, Artificial Sequence
  Synthetic oligonucleotide; TTC chr2 60456882 60456903 60456887 60456882 -
aaacataagtgaaaaaacttgc

SEQ ID NO: 226701 - DNA, 22 bp, Artificial Sequence
  Synthetic oligonucleotide; CTT chr2 60456862 60456883 60456867 60456862 -
gctggtaatagcatcttaaact

SEQ ID NO: 226702 - DNA, 22 bp, Artificial Sequence
  Synthetic oligonucleotide; TTG chr2 60456861 60456882 60456866 60456861 -
ctggtaatagcatcttaaactt

SEQ ID NO: 226703 - DNA, 22 bp, Artificial Sequence
  Synthetic oligonucleotide; CTG chr2 60456858 60456879 60456863 60456858 -
gtaatagcatcttaaactttta

SEQ ID NO: 226704 - DNA, 22 bp, Artificial Sequence
  Synthetic oligonucleotide; CTT chr2 60456845 60456866 60456850 60456845 -
aaacttttatttcctttaaatt

SEQ ID NO: 226705 - DNA, 22 bp, Artificial Sequence
  Synthetic oligonucleotide; TTA chr2 60456844 60456865 60456849 60456844 -
aacttttatttcctttaaattt

SEQ ID NO: 226706 - DNA, 22 bp, Artificial Sequence
  Synthetic oligonucleotide; CTT chr2 60456839 60456860 60456844 60456839 -
ttatttcctttaaattttttgc

SEQ ID NO: 226707 - DNA, 22 bp, Artificial Sequence
  Synthetic oligonucleotide; TTT chr2 60456838 60456859 60456843 60456838 -
tatttcctttaaattttttgct

SEQ ID NO: 226708 - DNA, 22 bp, Artificial Sequence
  Synthetic oligonucleotide; TTT chr2 60456837 60456858 60456842 60456837 -
atttcctttaaattttttgctg

SEQ ID NO: 226709 - DNA, 22 bp, Artificial Sequence
  Synthetic oligonucleotide; TTA chr2 60456836 60456857 60456841 60456836 -
tttcctttaaattttttgctgt

SEQ ID NO: 226710 - DNA, 22 bp, Artificial Sequence
  Synthetic oligonucleotide; TTT chr2 60456833 60456854 60456838 60456833 -
cctttaaattttttgctgttct

SEQ ID NO: 226711 - DNA, 22 bp, Artificial Sequence
  Synthetic oligonucleotide; TTC chr2 60456832 60456853 60456837 60456832 -
ctttaaattttttgctgttctt

SEQ ID NO: 226712 - DNA, 22 bp, Artificial Sequence
  Synthetic oligonucleotide; CTT chr2 60456829 60456850 60456834 60456829 -
taaattttttgctgttcttgtt

SEQ ID NO: 226713 - DNA, 22 bp, Artificial Sequence
  Synthetic oligonucleotide; TTT chr2 60456828 60456849 60456833 60456828 -
aaattttttgctgttcttgttg

SEQ ID NO: 226714 - DNA, 22 bp, Artificial Sequence
  Synthetic oligonucleotide; TTA chr2 60456827 60456848 60456832 60456827 -
aattttttgctgttcttgttgt

SEQ ID NO: 226715 - DNA, 22 bp, Artificial Sequence
  Synthetic oligonucleotide; TTT chr2 60456822 60456843 60456827 60456822 -
tttgctgttcttgttgtctaaa

SEQ ID NO: 226716 - DNA, 22 bp, Artificial Sequence
  Synthetic oligonucleotide; TTT chr2 60456821 60456842 60456826 60456821 -
ttgctgttcttgttgtctaaaa

SEQ ID NO: 226717 - DNA, 22 bp, Artificial Sequence
  Synthetic oligonucleotide; TTT chr2 60456820 60456841 60456825 60456820 -
tgctgttcttgttgtctaaaag

SEQ ID NO: 226718 - DNA, 22 bp, Artificial Sequence
  Synthetic oligonucleotide; TTT chr2 60456819 60456840 60456824 60456819 -
gctgttcttgttgtctaaaagt

SEQ ID NO: 226719 - DNA, 22 bp, Artificial Sequence
  Synthetic oligonucleotide; TTG chr2 60456818 60456839 60456823 60456818 -
ctgttcttgttgtctaaaagtt

SEQ ID NO: 226720 - DNA, 22 bp, Artificial Sequence
  Synthetic oligonucleotide; CTG chr2 60456815 60456836 60456820 60456815 -
ttcttgttgtctaaaagttctt

SEQ ID NO: 226721 - DNA, 22 bp, Artificial Sequence
  Synthetic oligonucleotide; TTC chr2 60456812 60456833 60456817 60456812 -
ttgttgtctaaaagttcttttc

SEQ ID NO: 226722 - DNA, 22 bp, Artificial Sequence
  Synthetic oligonucleotide; CTT chr2 60456810 60456831 60456815 60456810 -
gttgtctaaaagttcttttcta

SEQ ID NO: 226723 - DNA, 22 bp, Artificial Sequence
  Synthetic oligonucleotide; TTG chr2 60456809 60456830 60456814 60456809 -
ttgtctaaaagttcttttctat

SEQ ID NO: 226724 - DNA, 22 bp, Artificial Sequence
  Synthetic oligonucleotide; TTG chr2 60456806 60456827 60456811 60456806 -
tctaaaagttcttttctattct

SEQ ID NO: 226725 - DNA, 22 bp, Artificial Sequence
  Synthetic oligonucleotide; CTA chr2 60456802 60456823 60456807 60456802 -
aaagttcttttctattctccca

SEQ ID NO: 226726 - DNA, 22 bp, Artificial Sequence
  Synthetic oligonucleotide; TTC chr2 60456795 60456816 60456800 60456795 -
ttttctattctcccatccttgc

SEQ ID NO: 226727 - DNA, 22 bp, Artificial Sequence
  Synthetic oligonucleotide; CTT chr2 60456793 60456814 60456798 60456793 -
ttctattctcccatccttgctt

SEQ ID NO: 226728 - DNA, 22 bp, Artificial Sequence
  Synthetic oligonucleotide; TTT chr2 60456792 60456813 60456797 60456792 -
tctattctcccatccttgcttt

SEQ ID NO: 226729 - DNA, 22 bp, Artificial Sequence
  Synthetic oligonucleotide; TTT chr2 60456791 60456812 60456796 60456791 -
ctattctcccatccttgcttta

SEQ ID NO: 226730 - DNA, 22 bp, Artificial Sequence
  Synthetic oligonucleotide; TTC chr2 60456790 60456811 60456795 60456790 -
tattctcccatccttgctttat

SEQ ID NO: 226731 - DNA, 22 bp, Artificial Sequence
  Synthetic oligonucleotide; CTA chr2 60456788 60456809 60456793 60456788 -
ttctcccatccttgctttatct

SEQ ID NO: 226732 - DNA, 22 bp, Artificial Sequence
  Synthetic oligonucleotide; TTC chr2 60456785 60456806 60456790 60456785 -
tcccatccttgctttatcttag

SEQ ID NO: 226733 - DNA, 22 bp, Artificial Sequence
  Synthetic oligonucleotide; CTC chr2 60456783 60456804 60456788 60456783 -
ccatccttgctttatcttagaa

SEQ ID NO: 226734 - DNA, 22 bp, Artificial Sequence
  Synthetic oligonucleotide; CTT chr2 60456775 60456796 60456780 60456775 -
gctttatcttagaacataatgt

SEQ ID NO: 226735 - DNA, 22 bp, Artificial Sequence
  Synthetic oligonucleotide; TTG chr2 60456774 60456795 60456779 60456774 -
ctttatcttagaacataatgta

SEQ ID NO: 226736 - DNA, 22 bp, Artificial Sequence
  Synthetic oligonucleotide; CTT chr2 60456771 60456792 60456776 60456771 -
tatcttagaacataatgtaaaa

SEQ ID NO: 226737 - DNA, 22 bp, Artificial Sequence
  Synthetic oligonucleotide; TTT chr2 60456770 60456791 60456775 60456770 -
atcttagaacataatgtaaaaa

SEQ ID NO: 226738 - DNA, 22 bp, Artificial Sequence
  Synthetic oligonucleotide; TTA chr2 60456769 60456790 60456774 60456769 -
tcttagaacataatgtaaaaaa

SEQ ID NO: 226739 - DNA, 22 bp, Artificial Sequence
  Synthetic oligonucleotide; CTT chr2 60456765 60456786 60456770 60456765 -
agaacataatgtaaaaaagatt

SEQ ID NO: 226740 - DNA, 22 bp, Artificial Sequence
  Synthetic oligonucleotide; TTA chr2 60456764 60456785 60456769 60456764 -
gaacataatgtaaaaaagattt

SEQ ID NO: 226741 - DNA, 22 bp, Artificial Sequence
  Synthetic oligonucleotide; TTT chr2 60456742 60456763 60456747 60456742 -
ttttaaaaaaaatcagctcttt

SEQ ID NO: 226742 - DNA, 22 bp, Artificial Sequence
  Synthetic oligonucleotide; TTT chr2 60456741 60456762 60456746 60456741 -
tttaaaaaaaatcagctctttg

SEQ ID NO: 226743 - DNA, 22 bp, Artificial Sequence
  Synthetic oligonucleotide; TTT chr2 60456740 60456761 60456745 60456740 -
ttaaaaaaaatcagctctttgg

SEQ ID NO: 226744 - DNA, 22 bp, Artificial Sequence
  Synthetic oligonucleotide; TTT chr2 60456739 60456760 60456744 60456739 -
taaaaaaaatcagctctttggt

SEQ ID NO: 226745 - DNA, 22 bp, Artificial Sequence
  Synthetic oligonucleotide; TTT chr2 60456738 60456759 60456743 60456738 -
aaaaaaaatcagctctttggtt

SEQ ID NO: 226746 - DNA, 22 bp, Artificial Sequence
  Synthetic oligonucleotide; TTA chr2 60456737 60456758 60456742 60456737 -
aaaaaaatcagctctttggttt

SEQ ID NO: 226747 - DNA, 22 bp, Artificial Sequence
  Synthetic oligonucleotide; CTC chr2 60456723 60456744 60456728 60456723 -
tttggtttccatgtaagagtct

SEQ ID NO: 226748 - DNA, 22 bp, Artificial Sequence
  Synthetic oligonucleotide; CTT chr2 60456721 60456742 60456726 60456721 -
tggtttccatgtaagagtcttt

SEQ ID NO: 226749 - DNA, 22 bp, Artificial Sequence
  Synthetic oligonucleotide; TTT chr2 60456720 60456741 60456725 60456720 -
ggtttccatgtaagagtctttt

SEQ ID NO: 226750 - DNA, 22 bp, Artificial Sequence
  Synthetic oligonucleotide; TTG chr2 60456719 60456740 60456724 60456719 -
gtttccatgtaagagtcttttc

SEQ ID NO: 226751 - DNA, 22 bp, Artificial Sequence
  Synthetic oligonucleotide; TTT chr2 60456715 60456736 60456720 60456715 -
ccatgtaagagtcttttctcat

SEQ ID NO: 226752 - DNA, 22 bp, Artificial Sequence
  Synthetic oligonucleotide; TTC chr2 60456714 60456735 60456719 60456714 -
catgtaagagtcttttctcata

SEQ ID NO: 226753 - DNA, 22 bp, Artificial Sequence
  Synthetic oligonucleotide; CTT chr2 60456700 60456721 60456705 60456700 -
ttctcataacaaaataacccca

SEQ ID NO: 226754 - DNA, 22 bp, Artificial Sequence
  Synthetic oligonucleotide; TTT chr2 60456699 60456720 60456704 60456699 -
tctcataacaaaataaccccac

SEQ ID NO: 226755 - DNA, 22 bp, Artificial Sequence
  Synthetic oligonucleotide; TTT chr2 60456698 60456719 60456703 60456698 -
ctcataacaaaataaccccact

SEQ ID NO: 226756 - DNA, 22 bp, Artificial Sequence
  Synthetic oligonucleotide; TTC chr2 60456697 60456718 60456702 60456697 -
tcataacaaaataaccccactt

SEQ ID NO: 226757 - DNA, 22 bp, Artificial Sequence
  Synthetic oligonucleotide; CTC chr2 60456695 60456716 60456700 60456695 -
ataacaaaataaccccactttt

SEQ ID NO: 226758 - DNA, 22 bp, Artificial Sequence
  Synthetic oligonucleotide; CTT chr2 60456675 60456696 60456680 60456675 -
ttgaaatctaaaaatctggaaa

SEQ ID NO: 226759 - DNA, 22 bp, Artificial Sequence
  Synthetic oligonucleotide; TTT chr2 60456674 60456695 60456679 60456674 -
tgaaatctaaaaatctggaaac

SEQ ID NO: 226760 - DNA, 22 bp, Artificial Sequence
  Synthetic oligonucleotide; TTT chr2 60456673 60456694 60456678 60456673 -
gaaatctaaaaatctggaaaca

SEQ ID NO: 226761 - DNA, 22 bp, Artificial Sequence
  Synthetic oligonucleotide; TTG chr2 60456672 60456693 60456677 60456672 -
aaatctaaaaatctggaaacaa

SEQ ID NO: 226762 - DNA, 22 bp, Artificial Sequence
  Synthetic oligonucleotide; CTA chr2 60456665 60456686 60456670 60456665 -
aaaatctggaaacaaaggcatc

SEQ ID NO: 226763 - DNA, 22 bp, Artificial Sequence
  Synthetic oligonucleotide; CTG chr2 60456657 60456678 60456662 60456657 -
gaaacaaaggcatcaggttttg

SEQ ID NO: 226764 - DNA, 22 bp, Artificial Sequence
  Synthetic oligonucleotide; TTT chr2 60456637 60456658 60456642 60456637 -
tgttttgttttgttttgttttg

SEQ ID NO: 226765 - DNA, 22 bp, Artificial Sequence
  Synthetic oligonucleotide; TTT chr2 60456636 60456657 60456641 60456636 -
gttttgttttgttttgttttgt

SEQ ID NO: 226766 - DNA, 22 bp, Artificial Sequence
  Synthetic oligonucleotide; TTG chr2 60456635 60456656 60456640 60456635 -
ttttgttttgttttgttttgtt

SEQ ID NO: 226767 - DNA, 22 bp, Artificial Sequence
  Synthetic oligonucleotide; TTT chr2 60456632 60456653 60456637 60456632 -
tgttttgttttgttttgtttaa

SEQ ID NO: 226768 - DNA, 22 bp, Artificial Sequence
  Synthetic oligonucleotide; TTT chr2 60456631 60456652 60456636 60456631 -
gttttgttttgttttgtttaaa

SEQ ID NO: 226769 - DNA, 22 bp, Artificial Sequence
  Synthetic oligonucleotide; TTG chr2 60456630 60456651 60456635 60456630 -
ttttgttttgttttgtttaaaa

SEQ ID NO: 226770 - DNA, 22 bp, Artificial Sequence
  Synthetic oligonucleotide; TTT chr2 60456627 60456648 60456632 60456627 -
tgttttgttttgtttaaaaaag

SEQ ID NO: 226771 - DNA, 22 bp, Artificial Sequence
  Synthetic oligonucleotide; TTT chr2 60456626 60456647 60456631 60456626 -
gttttgttttgtttaaaaaaga

SEQ ID NO: 226772 - DNA, 22 bp, Artificial Sequence
  Synthetic oligonucleotide; TTG chr2 60456625 60456646 60456630 60456625 -
ttttgttttgtttaaaaaagag

SEQ ID NO: 226773 - DNA, 22 bp, Artificial Sequence
  Synthetic oligonucleotide; TTT chr2 60456622 60456643 60456627 60456622 -
tgttttgtttaaaaaagaggga

SEQ ID NO: 226774 - DNA, 22 bp, Artificial Sequence
  Synthetic oligonucleotide; TTT chr2 60456621 60456642 60456626 60456621 -
gttttgtttaaaaaagagggag

SEQ ID NO: 226775 - DNA, 22 bp, Artificial Sequence
  Synthetic oligonucleotide; TTG chr2 60456620 60456641 60456625 60456620 -
ttttgtttaaaaaagagggaga

SEQ ID NO: 226776 - DNA, 22 bp, Artificial Sequence
  Synthetic oligonucleotide; TTT chr2 60456617 60456638 60456622 60456617 -
tgtttaaaaaagagggagaaaa

SEQ ID NO: 226777 - DNA, 22 bp, Artificial Sequence
  Synthetic oligonucleotide; TTT chr2 60456616 60456637 60456621 60456616 -
gtttaaaaaagagggagaaaaa

SEQ ID NO: 226778 - DNA, 22 bp, Artificial Sequence
  Synthetic oligonucleotide; TTG chr2 60456615 60456636 60456620 60456615 -
tttaaaaaagagggagaaaaaa

SEQ ID NO: 226779 - DNA, 22 bp, Artificial Sequence
  Synthetic oligonucleotide; TTT chr2 60456612 60456633 60456617 60456612 -
aaaaaagagggagaaaaaaaga

SEQ ID NO: 226780 - DNA, 22 bp, Artificial Sequence
  Synthetic oligonucleotide; TTA chr2 60456611 60456632 60456616 60456611 -
aaaaagagggagaaaaaaagag

SEQ ID NO: 226781 - DNA, 22 bp, Artificial Sequence
  Synthetic oligonucleotide; CTA chr2 60456560 60456581 60456565 60456560 -
ggggtgtagccagacatagtga

SEQ ID NO: 226782 - DNA, 22 bp, Artificial Sequence
  Synthetic oligonucleotide; CTT chr2 60456532 60456553 60456537 60456532 -
tggaatcagccactgatttcct

SEQ ID NO: 226783 - DNA, 22 bp, Artificial Sequence
  Synthetic oligonucleotide; TTT chr2 60456531 60456552 60456536 60456531 -
ggaatcagccactgatttcctg

SEQ ID NO: 226784 - DNA, 22 bp, Artificial Sequence
  Synthetic oligonucleotide; TTG chr2 60456530 60456551 60456535 60456530 -
gaatcagccactgatttcctga

SEQ ID NO: 226785 - DNA, 22 bp, Artificial Sequence
  Synthetic oligonucleotide; CTG chr2 60456517 60456538 60456522 60456517 -
atttcctgagatgcatagtggt

SEQ ID NO: 226786 - DNA, 22 bp, Artificial Sequence
  Synthetic oligonucleotide; TTT chr2 60456513 60456534 60456518 60456513 -
cctgagatgcatagtggtttgc

SEQ ID NO: 226787 - DNA, 22 bp, Artificial Sequence
  Synthetic oligonucleotide; TTC chr2 60456512 60456533 60456517 60456512 -
ctgagatgcatagtggtttgcc

SEQ ID NO: 226788 - DNA, 22 bp, Artificial Sequence
  Synthetic oligonucleotide; CTG chr2 60456509 60456530 60456514 60456509 -
agatgcatagtggtttgccttg

SEQ ID NO: 226789 - DNA, 22 bp, Artificial Sequence
  Synthetic oligonucleotide; TTT chr2 60456493 60456514 60456498 60456493 -
gccttgtggttctgagatccca

SEQ ID NO: 226790 - DNA, 22 bp, Artificial Sequence
  Synthetic oligonucleotide; TTG chr2 60456492 60456513 60456497 60456492 -
ccttgtggttctgagatcccag

SEQ ID NO: 226791 - DNA, 22 bp, Artificial Sequence
  Synthetic oligonucleotide; CTT chr2 60456488 60456509 60456493 60456488 -
gtggttctgagatcccaggaac

SEQ ID NO: 226792 - DNA, 22 bp, Artificial Sequence
  Synthetic oligonucleotide; TTG chr2 60456487 60456508 60456492 60456487 -
tggttctgagatcccaggaacc

SEQ ID NO: 226793 - DNA, 22 bp, Artificial Sequence
  Synthetic oligonucleotide; TTC chr2 60456481 60456502 60456486 60456481 -
tgagatcccaggaaccctagat

SEQ ID NO: 226794 - DNA, 22 bp, Artificial Sequence
  Synthetic oligonucleotide; CTG chr2 60456479 60456500 60456484 60456479 -
agatcccaggaaccctagatgc

SEQ ID NO: 226795 - DNA, 22 bp, Artificial Sequence
  Synthetic oligonucleotide; CTA chr2 60456462 60456483 60456467 60456462 -
gatgctacagattactttaggt

SEQ ID NO: 226796 - DNA, 22 bp, Artificial Sequence
  Synthetic oligonucleotide; CTA chr2 60456455 60456476 60456460 60456455 -
cagattactttaggtgttttga

SEQ ID NO: 226797 - DNA, 22 bp, Artificial Sequence
  Synthetic oligonucleotide; TTA chr2 60456448 60456469 60456453 60456448 -
ctttaggtgttttgatagggtc

SEQ ID NO: 226798 - DNA, 22 bp, Artificial Sequence
  Synthetic oligonucleotide; CTT chr2 60456445 60456466 60456450 60456445 -
taggtgttttgatagggtcttc

SEQ ID NO: 226799 - DNA, 22 bp, Artificial Sequence
  Synthetic oligonucleotide; TTT chr2 60456444 60456465 60456449 60456444 -
aggtgttttgatagggtcttcc

SEQ ID NO: 226800 - DNA, 22 bp, Artificial Sequence
  Synthetic oligonucleotide; TTA chr2 60456443 60456464 60456448 60456443 -
ggtgttttgatagggtcttcct

SEQ ID NO: 226801 - DNA, 22 bp, Artificial Sequence
  Synthetic oligonucleotide; TTT chr2 60456436 60456457 60456441 60456436 -
tgatagggtcttcctggatgac

SEQ ID NO: 226802 - DNA, 22 bp, Artificial Sequence
  Synthetic oligonucleotide; TTT chr2 60456435 60456456 60456440 60456435 -
gatagggtcttcctggatgaca

SEQ ID NO: 226803 - DNA, 22 bp, Artificial Sequence
  Synthetic oligonucleotide; TTG chr2 60456434 60456455 60456439 60456434 -
atagggtcttcctggatgacag

SEQ ID NO: 226804 - DNA, 22 bp, Artificial Sequence
  Synthetic oligonucleotide; CTT chr2 60456424 60456445 60456429 60456424 -
cctggatgacagcaaataaggg

SEQ ID NO: 226805 - DNA, 22 bp, Artificial Sequence
  Synthetic oligonucleotide; TTC chr2 60456423 60456444 60456428 60456423 -
ctggatgacagcaaataagggc

SEQ ID NO: 226806 - DNA, 22 bp, Artificial Sequence
  Synthetic oligonucleotide; CTG chr2 60456420 60456441 60456425 60456420 -
gatgacagcaaataagggcggg

SEQ ID NO: 226807 - DNA, 22 bp, Artificial Sequence
  Synthetic oligonucleotide; CTT chr2 60456389 60456410 60456394 60456389 -
caattatcttctgaccagccag

SEQ ID NO: 226808 - DNA, 22 bp, Artificial Sequence
  Synthetic oligonucleotide; TTC chr2 60456388 60456409 60456393 60456388 -
aattatcttctgaccagccagt

SEQ ID NO: 226809 - DNA, 22 bp, Artificial Sequence
  Synthetic oligonucleotide; TTA chr2 60456383 60456404 60456388 60456383 -
tcttctgaccagccagttaggt

SEQ ID NO: 226810 - DNA, 22 bp, Artificial Sequence
  Synthetic oligonucleotide; CTT chr2 60456379 60456400 60456384 60456379 -
ctgaccagccagttaggtctat

SEQ ID NO: 226811 - DNA, 22 bp, Artificial Sequence
  Synthetic oligonucleotide; TTC chr2 60456378 60456399 60456383 60456378 -
tgaccagccagttaggtctatt

SEQ ID NO: 226812 - DNA, 22 bp, Artificial Sequence
  Synthetic oligonucleotide; CTG chr2 60456376 60456397 60456381 60456376 -
accagccagttaggtctatttt

SEQ ID NO: 226813 - DNA, 22 bp, Artificial Sequence
  Synthetic oligonucleotide; TTA chr2 60456364 60456385 60456369 60456364 -
ggtctattttaaaaatccttag

SEQ ID NO: 226814 - DNA, 22 bp, Artificial Sequence
  Synthetic oligonucleotide; CTA chr2 60456358 60456379 60456363 60456358 -
ttttaaaaatccttagaaatct

SEQ ID NO: 226815 - DNA, 22 bp, Artificial Sequence
  Synthetic oligonucleotide; TTT chr2 60456355 60456376 60456360 60456355 -
taaaaatccttagaaatctgtg

SEQ ID NO: 226816 - DNA, 22 bp, Artificial Sequence
  Synthetic oligonucleotide; TTT chr2 60456354 60456375 60456359 60456354 -
aaaaatccttagaaatctgtgt

SEQ ID NO: 226817 - DNA, 22 bp, Artificial Sequence
  Synthetic oligonucleotide; TTA chr2 60456353 60456374 60456358 60456353 -
aaaatccttagaaatctgtgtt

SEQ ID NO: 226818 - DNA, 22 bp, Artificial Sequence
  Synthetic oligonucleotide; CTT chr2 60456344 60456365 60456349 60456344 -
agaaatctgtgttgtcactttt

SEQ ID NO: 226819 - DNA, 22 bp, Artificial Sequence
  Synthetic oligonucleotide; TTA chr2 60456343 60456364 60456348 60456343 -
gaaatctgtgttgtcactttta

SEQ ID NO: 226820 - DNA, 22 bp, Artificial Sequence
  Synthetic oligonucleotide; CTG chr2 60456335 60456356 60456340 60456335 -
tgttgtcacttttacaaatact

SEQ ID NO: 226821 - DNA, 22 bp, Artificial Sequence
  Synthetic oligonucleotide; TTG chr2 60456330 60456351 60456335 60456330 -
tcacttttacaaatactgcatg

SEQ ID NO: 226822 - DNA, 22 bp, Artificial Sequence
  Synthetic oligonucleotide; CTT chr2 60456324 60456345 60456329 60456324 -
ttacaaatactgcatgttgcag

SEQ ID NO: 226823 - DNA, 22 bp, Artificial Sequence
  Synthetic oligonucleotide; TTT chr2 60456323 60456344 60456328 60456323 -
tacaaatactgcatgttgcagc

SEQ ID NO: 226824 - DNA, 22 bp, Artificial Sequence
  Synthetic oligonucleotide; TTT chr2 60456322 60456343 60456327 60456322 -
acaaatactgcatgttgcagca

SEQ ID NO: 226825 - DNA, 22 bp, Artificial Sequence
  Synthetic oligonucleotide; TTA chr2 60456321 60456342 60456326 60456321 -
caaatactgcatgttgcagcat

SEQ ID NO: 226826 - DNA, 22 bp, Artificial Sequence
  Synthetic oligonucleotide; CTG chr2 60456312 60456333 60456317 60456312 -
catgttgcagcatctatttgct

SEQ ID NO: 226827 - DNA, 22 bp, Artificial Sequence
  Synthetic oligonucleotide; TTG chr2 60456305 60456326 60456310 60456305 -
cagcatctatttgctttactaa

SEQ ID NO: 226828 - DNA, 22 bp, Artificial Sequence
  Synthetic oligonucleotide; CTA chr2 60456296 60456317 60456301 60456296 -
tttgctttactaaacacatacc

SEQ ID NO: 226829 - DNA, 22 bp, Artificial Sequence
  Synthetic oligonucleotide; TTT chr2 60456293 60456314 60456298 60456293 -
gctttactaaacacatacctct

SEQ ID NO: 226830 - DNA, 22 bp, Artificial Sequence
  Synthetic oligonucleotide; TTG chr2 60456292 60456313 60456297 60456292 -
ctttactaaacacatacctctg

SEQ ID NO: 226831 - DNA, 22 bp, Artificial Sequence
  Synthetic oligonucleotide; CTT chr2 60456289 60456310 60456294 60456289 -
tactaaacacatacctctgtga

SEQ ID NO: 226832 - DNA, 22 bp, Artificial Sequence
  Synthetic oligonucleotide; TTT chr2 60456288 60456309 60456293 60456288 -
actaaacacatacctctgtgat

SEQ ID NO: 226833 - DNA, 22 bp, Artificial Sequence
  Synthetic oligonucleotide; TTA chr2 60456287 60456308 60456292 60456287 -
ctaaacacatacctctgtgata

SEQ ID NO: 226834 - DNA, 22 bp, Artificial Sequence
  Synthetic oligonucleotide; CTA chr2 60456284 60456305 60456289 60456284 -
aacacatacctctgtgatatcg

SEQ ID NO: 226835 - DNA, 22 bp, Artificial Sequence
  Synthetic oligonucleotide; CTC chr2 60456272 60456293 60456277 60456272 -
tgtgatatcgtgtccctgttcc

SEQ ID NO: 226836 - DNA, 22 bp, Artificial Sequence
  Synthetic oligonucleotide; CTG chr2 60456270 60456291 60456275 60456270 -
tgatatcgtgtccctgttccca

SEQ ID NO: 226837 - DNA, 22 bp, Artificial Sequence
  Synthetic oligonucleotide; CTG chr2 60456254 60456275 60456259 60456254 -
ttcccagtgtagatgaatgaat

SEQ ID NO: 226838 - DNA, 22 bp, Artificial Sequence
  Synthetic oligonucleotide; TTC chr2 60456251 60456272 60456256 60456251 -
ccagtgtagatgaatgaatacg

SEQ ID NO: 226839 - DNA, 22 bp, Artificial Sequence
  Synthetic oligonucleotide; TTG chr2 60456223 60456244 60456228 60456223 -
ttcttatttttgtaaaaaacca

SEQ ID NO: 226840 - DNA, 22 bp, Artificial Sequence
  Synthetic oligonucleotide; TTC chr2 60456220 60456241 60456225 60456220 -
ttatttttgtaaaaaaccaaaa

SEQ ID NO: 226841 - DNA, 22 bp, Artificial Sequence
  Synthetic oligonucleotide; CTT chr2 60456218 60456239 60456223 60456218 -
atttttgtaaaaaaccaaaaca

SEQ ID NO: 226842 - DNA, 22 bp, Artificial Sequence
  Synthetic oligonucleotide; TTA chr2 60456217 60456238 60456222 60456217 -
tttttgtaaaaaaccaaaacaa

SEQ ID NO: 226843 - DNA, 22 bp, Artificial Sequence
  Synthetic oligonucleotide; TTT chr2 60456214 60456235 60456219 60456214 -
ttgtaaaaaaccaaaacaaaag

SEQ ID NO: 226844 - DNA, 22 bp, Artificial Sequence
  Synthetic oligonucleotide; TTT chr2 60456213 60456234 60456218 60456213 -
tgtaaaaaaccaaaacaaaagc

SEQ ID NO: 226845 - DNA, 22 bp, Artificial Sequence
  Synthetic oligonucleotide; TTT chr2 60456212 60456233 60456217 60456212 -
gtaaaaaaccaaaacaaaagcc

SEQ ID NO: 226846 - DNA, 22 bp, Artificial Sequence
  Synthetic oligonucleotide; TTG chr2 60456211 60456232 60456216 60456211 -
taaaaaaccaaaacaaaagccg

SEQ ID NO: 226847 - DNA, 22 bp, Artificial Sequence
  Synthetic oligonucleotide; TTC chr2 60456186 60456207 60456191 60456186 -
tgttgtcttcttgtggtagcat

SEQ ID NO: 226848 - DNA, 22 bp, Artificial Sequence
  Synthetic oligonucleotide; CTG chr2 60456184 60456205 60456189 60456184 -
ttgtcttcttgtggtagcattt

SEQ ID NO: 226849 - DNA, 22 bp, Artificial Sequence
  Synthetic oligonucleotide; TTG chr2 60456181 60456202 60456186 60456181 -
tcttcttgtggtagcatttttt

SEQ ID NO: 226850 - DNA, 22 bp, Artificial Sequence
  Synthetic oligonucleotide; CTT chr2 60456177 60456198 60456182 60456177 -
cttgtggtagcattttttgtcg

SEQ ID NO: 226851 - DNA, 22 bp, Artificial Sequence
  Synthetic oligonucleotide; TTC chr2 60456176 60456197 60456181 60456176 -
ttgtggtagcattttttgtcgc

SEQ ID NO: 226852 - DNA, 22 bp, Artificial Sequence
  Synthetic oligonucleotide; CTT chr2 60456174 60456195 60456179 60456174 -
gtggtagcattttttgtcgctc

SEQ ID NO: 226853 - DNA, 22 bp, Artificial Sequence
  Synthetic oligonucleotide; TTG chr2 60456173 60456194 60456178 60456173 -
tggtagcattttttgtcgctca

SEQ ID NO: 226854 - DNA, 22 bp, Artificial Sequence
  Synthetic oligonucleotide; TTT chr2 60456162 60456183 60456167 60456162 -
tttgtcgctcagttcttatgcc

SEQ ID NO: 226855 - DNA, 22 bp, Artificial Sequence
  Synthetic oligonucleotide; TTT chr2 60456161 60456182 60456166 60456161 -
ttgtcgctcagttcttatgccc

SEQ ID NO: 226856 - DNA, 22 bp, Artificial Sequence
  Synthetic oligonucleotide; TTT chr2 60456160 60456181 60456165 60456160 -
tgtcgctcagttcttatgccct

SEQ ID NO: 226857 - DNA, 22 bp, Artificial Sequence
  Synthetic oligonucleotide; TTT chr2 60456159 60456180 60456164 60456159 -
gtcgctcagttcttatgcccta

SEQ ID NO: 226858 - DNA, 22 bp, Artificial Sequence
  Synthetic oligonucleotide; TTG chr2 60456158 60456179 60456163 60456158 -
tcgctcagttcttatgccctag

SEQ ID NO: 226859 - DNA, 22 bp, Artificial Sequence
  Synthetic oligonucleotide; CTC chr2 60456152 60456173 60456157 60456152 -
agttcttatgccctagtgcctg

SEQ ID NO: 226860 - DNA, 22 bp, Artificial Sequence
  Synthetic oligonucleotide; TTC chr2 60456147 60456168 60456152 60456147 -
ttatgccctagtgcctgtgagg

SEQ ID NO: 226861 - DNA, 22 bp, Artificial Sequence
  Synthetic oligonucleotide; CTT chr2 60456145 60456166 60456150 60456145 -
atgccctagtgcctgtgaggtg

SEQ ID NO: 226862 - DNA, 22 bp, Artificial Sequence
  Synthetic oligonucleotide; TTA chr2 60456144 60456165 60456149 60456144 -
tgccctagtgcctgtgaggtgg

SEQ ID NO: 226863 - DNA, 22 bp, Artificial Sequence
  Synthetic oligonucleotide; CTA chr2 60456137 60456158 60456142 60456137 -
gtgcctgtgaggtggccttttc

SEQ ID NO: 226864 - DNA, 22 bp, Artificial Sequence
  Synthetic oligonucleotide; CTG chr2 60456130 60456151 60456135 60456130 -
tgaggtggccttttcatgtcat

SEQ ID NO: 226865 - DNA, 22 bp, Artificial Sequence
  Synthetic oligonucleotide; CTT chr2 60456118 60456139 60456123 60456118 -
ttcatgtcatgccttttatctg

SEQ ID NO: 226866 - DNA, 22 bp, Artificial Sequence
  Synthetic oligonucleotide; TTT chr2 60456117 60456138 60456122 60456117 -
tcatgtcatgccttttatctga

SEQ ID NO: 226867 - DNA, 22 bp, Artificial Sequence
  Synthetic oligonucleotide; TTT chr2 60456116 60456137 60456121 60456116 -
catgtcatgccttttatctgag

SEQ ID NO: 226868 - DNA, 22 bp, Artificial Sequence
  Synthetic oligonucleotide; TTC chr2 60456115 60456136 60456120 60456115 -
atgtcatgccttttatctgagg

SEQ ID NO: 226869 - DNA, 22 bp, Artificial Sequence
  Synthetic oligonucleotide; CTT chr2 60456103 60456124 60456108 60456103 -
ttatctgaggcaagaatagttt

SEQ ID NO: 226870 - DNA, 22 bp, Artificial Sequence
  Synthetic oligonucleotide; TTT chr2 60456102 60456123 60456107 60456102 -
tatctgaggcaagaatagtttt

SEQ ID NO: 226871 - DNA, 22 bp, Artificial Sequence
  Synthetic oligonucleotide; TTT chr2 60456101 60456122 60456106 60456101 -
atctgaggcaagaatagtttta

SEQ ID NO: 226872 - DNA, 22 bp, Artificial Sequence
  Synthetic oligonucleotide; TTA chr2 60456100 60456121 60456105 60456100 -
tctgaggcaagaatagttttat

SEQ ID NO: 226873 - DNA, 22 bp, Artificial Sequence
  Synthetic oligonucleotide; CTG chr2 60456096 60456117 60456101 60456096 -
aggcaagaatagttttatcttt

SEQ ID NO: 226874 - DNA, 22 bp, Artificial Sequence
  Synthetic oligonucleotide; TTT chr2 60456081 60456102 60456086 60456081 -
tatctttctaaagtataaagaa

SEQ ID NO: 226875 - DNA, 22 bp, Artificial Sequence
  Synthetic oligonucleotide; TTT chr2 60456080 60456101 60456085 60456080 -
atctttctaaagtataaagaaa

SEQ ID NO: 226876 - DNA, 22 bp, Artificial Sequence
  Synthetic oligonucleotide; TTA chr2 60456079 60456100 60456084 60456079 -
tctttctaaagtataaagaaag

SEQ ID NO: 226877 - DNA, 22 bp, Artificial Sequence
  Synthetic oligonucleotide; CTT chr2 60456075 60456096 60456080 60456075 -
tctaaagtataaagaaagtcaa

SEQ ID NO: 226878 - DNA, 22 bp, Artificial Sequence
  Synthetic oligonucleotide; TTT chr2 60456074 60456095 60456079 60456074 -
ctaaagtataaagaaagtcaat

SEQ ID NO: 226879 - DNA, 22 bp, Artificial Sequence
  Synthetic oligonucleotide; TTC chr2 60456073 60456094 60456078 60456073 -
taaagtataaagaaagtcaatg

SEQ ID NO: 226880 - DNA, 22 bp, Artificial Sequence
  Synthetic oligonucleotide; CTA chr2 60456071 60456092 60456076 60456071 -
aagtataaagaaagtcaatgtt

SEQ ID NO: 226881 - DNA, 22 bp, Artificial Sequence
  Synthetic oligonucleotide; TTT chr2 60456048 60456069 60456053 60456048 -
tctgaaaagccagtttgggtgg

SEQ ID NO: 226882 - DNA, 22 bp, Artificial Sequence
  Synthetic oligonucleotide; TTT chr2 60456047 60456068 60456052 60456047 -
ctgaaaagccagtttgggtggg

SEQ ID NO: 226883 - DNA, 22 bp, Artificial Sequence
  Synthetic oligonucleotide; TTC chr2 60456046 60456067 60456051 60456046 -
tgaaaagccagtttgggtggga

SEQ ID NO: 226884 - DNA, 22 bp, Artificial Sequence
  Synthetic oligonucleotide; CTG chr2 60456044 60456065 60456049 60456044 -
aaaagccagtttgggtgggaag

SEQ ID NO: 226885 - DNA, 22 bp, Artificial Sequence
  Synthetic oligonucleotide; TTT chr2 60456032 60456053 60456037 60456032 -
gggtgggaaggagagagtgggg

SEQ ID NO: 226886 - DNA, 22 bp, Artificial Sequence
  Synthetic oligonucleotide; TTG chr2 60456031 60456052 60456036 60456031 -
ggtgggaaggagagagtggggc

SEQ ID NO: 226887 - DNA, 22 bp, Artificial Sequence
  Synthetic oligonucleotide; CTA chr2 60456007 60456028 60456012 60456007 -
gaggaatccactgagaaaggat

SEQ ID NO: 226888 - DNA, 22 bp, Artificial Sequence
  Synthetic oligonucleotide; CTG chr2 60455994 60456015 60455999 60455994 -
agaaaggatgttggagaatatt

SEQ ID NO: 226889 - DNA, 22 bp, Artificial Sequence
  Synthetic oligonucleotide; TTG chr2 60455981 60456002 60455986 60455981 -
gagaatattacataggaggtgg

SEQ ID NO: 226890 - DNA, 22 bp, Artificial Sequence
  Synthetic oligonucleotide; TTA chr2 60455971 60455992 60455976 60455971 -
cataggaggtggggtggggtgg

SEQ ID NO: 226891 - DNA, 22 bp, Artificial Sequence
  Synthetic oligonucleotide; CTT chr2 60455935 60455956 60455940 60455935 -
gagaacttgatgtttgtcactg

SEQ ID NO: 226892 - DNA, 22 bp, Artificial Sequence
  Synthetic oligonucleotide; TTG chr2 60455934 60455955 60455939 60455934 -
agaacttgatgtttgtcactga

SEQ ID NO: 226893 - DNA, 22 bp, Artificial Sequence
  Synthetic oligonucleotide; CTT chr2 60455927 60455948 60455932 60455927 -
gatgtttgtcactgaacttaga

SEQ ID NO: 226894 - DNA, 22 bp, Artificial Sequence
  Synthetic oligonucleotide; TTG chr2 60455926 60455947 60455931 60455926 -
atgtttgtcactgaacttagaa

SEQ ID NO: 226895 - DNA, 22 bp, Artificial Sequence
  Synthetic oligonucleotide; TTT chr2 60455920 60455941 60455925 60455920 -
gtcactgaacttagaaaagata

SEQ ID NO: 226896 - DNA, 22 bp, Artificial Sequence
  Synthetic oligonucleotide; TTG chr2 60455919 60455940 60455924 60455919 -
tcactgaacttagaaaagatat

SEQ ID NO: 226897 - DNA, 22 bp, Artificial Sequence
  Synthetic oligonucleotide; CTG chr2 60455913 60455934 60455918 60455913 -
aacttagaaaagatatactgta

SEQ ID NO: 226898 - DNA, 22 bp, Artificial Sequence
  Synthetic oligonucleotide; CTT chr2 60455908 60455929 60455913 60455908 -
agaaaagatatactgtatgtgt

SEQ ID NO: 226899 - DNA, 22 bp, Artificial Sequence
  Synthetic oligonucleotide; TTA chr2 60455907 60455928 60455912 60455907 -
gaaaagatatactgtatgtgtt

SEQ ID NO: 226900 - DNA, 22 bp, Artificial Sequence
  Synthetic oligonucleotide; CTG chr2 60455893 60455914 60455898 60455893 -
tatgtgttttggattaggtttc

SEQ ID NO: 226901 - DNA, 22 bp, Artificial Sequence
  Synthetic oligonucleotide; TTT chr2 60455884 60455905 60455889 60455884 -
tggattaggtttctccaaaact

SEQ ID NO: 226902 - DNA, 22 bp, Artificial Sequence
  Synthetic oligonucleotide; TTT chr2 60455883 60455904 60455888 60455883 -
ggattaggtttctccaaaactg

SEQ ID NO: 226903 - DNA, 22 bp, Artificial Sequence
  Synthetic oligonucleotide; TTG chr2 60455882 60455903 60455887 60455882 -
gattaggtttctccaaaactga

SEQ ID NO: 226904 - DNA, 22 bp, Artificial Sequence
  Synthetic oligonucleotide; TTA chr2 60455877 60455898 60455882 60455877 -
ggtttctccaaaactgaatcca

SEQ ID NO: 226905 - DNA, 22 bp, Artificial Sequence
  Synthetic oligonucleotide; TTT chr2 60455872 60455893 60455877 60455872 -
ctccaaaactgaatccaaaatg

SEQ ID NO: 226906 - DNA, 22 bp, Artificial Sequence
  Synthetic oligonucleotide; TTC chr2 60455871 60455892 60455876 60455871 -
tccaaaactgaatccaaaatgc

SEQ ID NO: 226907 - DNA, 22 bp, Artificial Sequence
  Synthetic oligonucleotide; CTC chr2 60455869 60455890 60455874 60455869 -
caaaactgaatccaaaatgctg

SEQ ID NO: 226908 - DNA, 22 bp, Artificial Sequence
  Synthetic oligonucleotide; CTG chr2 60455861 60455882 60455866 60455861 -
aatccaaaatgctgctcaagac

SEQ ID NO: 226909 - DNA, 22 bp, Artificial Sequence
  Synthetic oligonucleotide; CTG chr2 60455847 60455868 60455852 60455847 -
ctcaagacagatagaaataatt

SEQ ID NO: 226910 - DNA, 22 bp, Artificial Sequence
  Synthetic oligonucleotide; CTC chr2 60455844 60455865 60455849 60455844 -
aagacagatagaaataattccc

SEQ ID NO: 226911 - DNA, 22 bp, Artificial Sequence
  Synthetic oligonucleotide; TTC chr2 60455824 60455845 60455829 60455824 -
cccagtgccatgccagctttag

SEQ ID NO: 226912 - DNA, 22 bp, Artificial Sequence
  Synthetic oligonucleotide; CTT chr2 60455805 60455826 60455810 60455805 -
tagatgtggtgacttcgactcc

SEQ ID NO: 226913 - DNA, 22 bp, Artificial Sequence
  Synthetic oligonucleotide; TTT chr2 60455804 60455825 60455809 60455804 -
agatgtggtgacttcgactcca

SEQ ID NO: 226914 - DNA, 22 bp, Artificial Sequence
  Synthetic oligonucleotide; TTA chr2 60455803 60455824 60455808 60455803 -
gatgtggtgacttcgactccac

SEQ ID NO: 226915 - DNA, 22 bp, Artificial Sequence
  Synthetic oligonucleotide; CTT chr2 60455790 60455811 60455795 60455790 -
cgactccaccctattaaatgtc

SEQ ID NO: 226916 - DNA, 22 bp, Artificial Sequence
  Synthetic oligonucleotide; TTC chr2 60455789 60455810 60455794 60455789 -
gactccaccctattaaatgtcc

SEQ ID NO: 226917 - DNA, 22 bp, Artificial Sequence
  Synthetic oligonucleotide; CTC chr2 60455784 60455805 60455789 60455784 -
caccctattaaatgtccataaa

SEQ ID NO: 226918 - DNA, 22 bp, Artificial Sequence
  Synthetic oligonucleotide; CTA chr2 60455777 60455798 60455782 60455777 -
ttaaatgtccataaaacctctg

SEQ ID NO: 226919 - DNA, 22 bp, Artificial Sequence
  Synthetic oligonucleotide; TTA chr2 60455774 60455795 60455779 60455774 -
aatgtccataaaacctctgtgt

SEQ ID NO: 226920 - DNA, 22 bp, Artificial Sequence
  Synthetic oligonucleotide; CTC chr2 60455757 60455778 60455762 60455757 -
tgtgtgtccctattactctttt

SEQ ID NO: 226921 - DNA, 22 bp, Artificial Sequence
  Synthetic oligonucleotide; CTG chr2 60455755 60455776 60455760 60455755 -
tgtgtccctattactcttttat

SEQ ID NO: 226922 - DNA, 22 bp, Artificial Sequence
  Synthetic oligonucleotide; CTA chr2 60455745 60455766 60455750 60455745 -
ttactcttttattaggagctat

SEQ ID NO: 226923 - DNA, 22 bp, Artificial Sequence
  Synthetic oligonucleotide; TTA chr2 60455742 60455763 60455747 60455742 -
ctcttttattaggagctatgag

SEQ ID NO: 226924 - DNA, 22 bp, Artificial Sequence
  Synthetic oligonucleotide; CTC chr2 60455739 60455760 60455744 60455739 -
ttttattaggagctatgagtgc

SEQ ID NO: 226925 - DNA, 22 bp, Artificial Sequence
  Synthetic oligonucleotide; CTT chr2 60455737 60455758 60455742 60455737 -
ttattaggagctatgagtgcaa

SEQ ID NO: 226926 - DNA, 22 bp, Artificial Sequence
  Synthetic oligonucleotide; TTT chr2 60455736 60455757 60455741 60455736 -
tattaggagctatgagtgcaac

SEQ ID NO: 226927 - DNA, 22 bp, Artificial Sequence
  Synthetic oligonucleotide; TTT chr2 60455735 60455756 60455740 60455735 -
attaggagctatgagtgcaact

SEQ ID NO: 226928 - DNA, 22 bp, Artificial Sequence
  Synthetic oligonucleotide; TTA chr2 60455734 60455755 60455739 60455734 -
ttaggagctatgagtgcaactg

SEQ ID NO: 226929 - DNA, 22 bp, Artificial Sequence
  Synthetic oligonucleotide; TTA chr2 60455731 60455752 60455736 60455731 -
ggagctatgagtgcaactgtgt

SEQ ID NO: 226930 - DNA, 22 bp, Artificial Sequence
  Synthetic oligonucleotide; CTA chr2 60455724 60455745 60455729 60455724 -
tgagtgcaactgtgtaggtttt

SEQ ID NO: 226931 - DNA, 22 bp, Artificial Sequence
  Synthetic oligonucleotide; CTG chr2 60455712 60455733 60455717 60455712 -
tgtaggttttatatacagtatt

SEQ ID NO: 226932 - DNA, 22 bp, Artificial Sequence
  Synthetic oligonucleotide; TTT chr2 60455703 60455724 60455708 60455703 -
tatatacagtattcattttaat

SEQ ID NO: 226933 - DNA, 22 bp, Artificial Sequence
  Synthetic oligonucleotide; TTT chr2 60455702 60455723 60455707 60455702 -
atatacagtattcattttaatt

SEQ ID NO: 226934 - DNA, 22 bp, Artificial Sequence
  Synthetic oligonucleotide; TTA chr2 60455701 60455722 60455706 60455701 -
tatacagtattcattttaattt

SEQ ID NO: 226935 - DNA, 22 bp, Artificial Sequence
  Synthetic oligonucleotide; TTC chr2 60455689 60455710 60455694 60455689 -
attttaatttctcagtatatgc

SEQ ID NO: 226936 - DNA, 22 bp, Artificial Sequence
  Synthetic oligonucleotide; TTT chr2 60455685 60455706 60455690 60455685 -
taatttctcagtatatgctgct

SEQ ID NO: 226937 - DNA, 22 bp, Artificial Sequence
  Synthetic oligonucleotide; TTT chr2 60455684 60455705 60455689 60455684 -
aatttctcagtatatgctgctc

SEQ ID NO: 226938 - DNA, 22 bp, Artificial Sequence
  Synthetic oligonucleotide; TTA chr2 60455683 60455704 60455688 60455683 -
atttctcagtatatgctgctct

SEQ ID NO: 226939 - DNA, 22 bp, Artificial Sequence
  Synthetic oligonucleotide; TTT chr2 60455679 60455700 60455684 60455679 -
ctcagtatatgctgctcttagc

SEQ ID NO: 226940 - DNA, 22 bp, Artificial Sequence
  Synthetic oligonucleotide; TTC chr2 60455678 60455699 60455683 60455678 -
tcagtatatgctgctcttagcg

SEQ ID NO: 226941 - DNA, 22 bp, Artificial Sequence
  Synthetic oligonucleotide; CTC chr2 60455676 60455697 60455681 60455676 -
agtatatgctgctcttagcgta

SEQ ID NO: 226942 - DNA, 22 bp, Artificial Sequence
  Synthetic oligonucleotide; CTG chr2 60455665 60455686 60455670 60455665 -
ctcttagcgtaattaggttttg

SEQ ID NO: 226943 - DNA, 22 bp, Artificial Sequence
  Synthetic oligonucleotide; CTC chr2 60455662 60455683 60455667 60455662 -
ttagcgtaattaggttttgcat

SEQ ID NO: 226944 - DNA, 22 bp, Artificial Sequence
  Synthetic oligonucleotide; CTT chr2 60455660 60455681 60455665 60455660 -
agcgtaattaggttttgcatcc

SEQ ID NO: 226945 - DNA, 22 bp, Artificial Sequence
  Synthetic oligonucleotide; TTA chr2 60455659 60455680 60455664 60455659 -
gcgtaattaggttttgcatcct

SEQ ID NO: 226946 - DNA, 22 bp, Artificial Sequence
  Synthetic oligonucleotide; TTA chr2 60455650 60455671 60455655 60455650 -
ggttttgcatcctgacagacag

SEQ ID NO: 226947 - DNA, 22 bp, Artificial Sequence
  Synthetic oligonucleotide; TTT chr2 60455645 60455666 60455650 60455645 -
tgcatcctgacagacagaatta

SEQ ID NO: 226948 - DNA, 22 bp, Artificial Sequence
  Synthetic oligonucleotide; TTT chr2 60455644 60455665 60455649 60455644 -
gcatcctgacagacagaattaa

SEQ ID NO: 226949 - DNA, 22 bp, Artificial Sequence
  Synthetic oligonucleotide; TTG chr2 60455643 60455664 60455648 60455643 -
catcctgacagacagaattaat

SEQ ID NO: 226950 - DNA, 22 bp, Artificial Sequence
  Synthetic oligonucleotide; CTG chr2 60455636 60455657 60455641 60455636 -
acagacagaattaatggtggat

SEQ ID NO: 226951 - DNA, 22 bp, Artificial Sequence
  Synthetic oligonucleotide; TTA chr2 60455623 60455644 60455628 60455623 -
atggtggatactgtacacttgt

SEQ ID NO: 226952 - DNA, 22 bp, Artificial Sequence
  Synthetic oligonucleotide; CTG chr2 60455610 60455631 60455615 60455610 -
tacacttgtctgttcaaatttc

SEQ ID NO: 226953 - DNA, 22 bp, Artificial Sequence
  Synthetic oligonucleotide; CTT chr2 60455603 60455624 60455608 60455603 -
gtctgttcaaatttcttaaatc

SEQ ID NO: 226954 - DNA, 22 bp, Artificial Sequence
  Synthetic oligonucleotide; TTG chr2 60455602 60455623 60455607 60455602 -
tctgttcaaatttcttaaatca

SEQ ID NO: 226955 - DNA, 22 bp, Artificial Sequence
  Synthetic oligonucleotide; CTG chr2 60455598 60455619 60455603 60455598 -
ttcaaatttcttaaatcaaatg

SEQ ID NO: 226956 - DNA, 22 bp, Artificial Sequence
  Synthetic oligonucleotide; TTC chr2 60455595 60455616 60455600 60455595 -
aaatttcttaaatcaaatgggg

SEQ ID NO: 226957 - DNA, 22 bp, Artificial Sequence
  Synthetic oligonucleotide; TTT chr2 60455589 60455610 60455594 60455589 -
cttaaatcaaatggggaatggg

SEQ ID NO: 226958 - DNA, 22 bp, Artificial Sequence
  Synthetic oligonucleotide; TTC chr2 60455588 60455609 60455593 60455588 -
ttaaatcaaatggggaatgggg

SEQ ID NO: 226959 - DNA, 22 bp, Artificial Sequence
  Synthetic oligonucleotide; CTT chr2 60455586 60455607 60455591 60455586 -
aaatcaaatggggaatggggag

SEQ ID NO: 226960 - DNA, 22 bp, Artificial Sequence
  Synthetic oligonucleotide; TTA chr2 60455585 60455606 60455590 60455585 -
aatcaaatggggaatggggagg

SEQ ID NO: 226961 - DNA, 22 bp, Artificial Sequence
  Synthetic oligonucleotide; CTG chr2 60455549 60455570 60455554 60455549 -
gtgataaatcacagattatgtt

SEQ ID NO: 226962 - DNA, 22 bp, Artificial Sequence
  Synthetic oligonucleotide; TTA chr2 60455531 60455552 60455536 60455531 -
tgtttgatttacatggtcccaa

SEQ ID NO: 226963 - DNA, 22 bp, Artificial Sequence
  Synthetic oligonucleotide; TTT chr2 60455526 60455547 60455531 60455526 -
gatttacatggtcccaaagtta

SEQ ID NO: 226964 - DNA, 22 bp, Artificial Sequence
  Synthetic oligonucleotide; TTG chr2 60455525 60455546 60455530 60455525 -
atttacatggtcccaaagttaa

SEQ ID NO: 226965 - DNA, 22 bp, Artificial Sequence
  Synthetic oligonucleotide; TTT chr2 60455521 60455542 60455526 60455521 -
acatggtcccaaagttaaataa

SEQ ID NO: 226966 - DNA, 22 bp, Artificial Sequence
  Synthetic oligonucleotide; TTA chr2 60455520 60455541 60455525 60455520 -
catggtcccaaagttaaataaa

SEQ ID NO: 226967 - DNA, 22 bp, Artificial Sequence
  Synthetic oligonucleotide; TTA chr2 60455504 60455525 60455509 60455504 -
aataaatttactgggagatggg

SEQ ID NO: 226968 - DNA, 22 bp, Artificial Sequence
  Synthetic oligonucleotide; TTT chr2 60455495 60455516 60455500 60455495 -
actgggagatgggttcttcagg

SEQ ID NO: 226969 - DNA, 22 bp, Artificial Sequence
  Synthetic oligonucleotide; TTA chr2 60455494 60455515 60455499 60455494 -
ctgggagatgggttcttcaggt

SEQ ID NO: 226970 - DNA, 22 bp, Artificial Sequence
  Synthetic oligonucleotide; CTG chr2 60455491 60455512 60455496 60455491 -
ggagatgggttcttcaggttac

SEQ ID NO: 226971 - DNA, 22 bp, Artificial Sequence
  Synthetic oligonucleotide; TTC chr2 60455479 60455500 60455484 60455479 -
ttcaggttacttagtctcctga

SEQ ID NO: 226972 - DNA, 22 bp, Artificial Sequence
  Synthetic oligonucleotide; CTT chr2 60455477 60455498 60455482 60455477 -
caggttacttagtctcctgact

SEQ ID NO: 226973 - DNA, 22 bp, Artificial Sequence
  Synthetic oligonucleotide; TTC chr2 60455476 60455497 60455481 60455476 -
aggttacttagtctcctgactt

SEQ ID NO: 226974 - DNA, 22 bp, Artificial Sequence
  Synthetic oligonucleotide; TTA chr2 60455470 60455491 60455475 60455470 -
cttagtctcctgacttattgac

SEQ ID NO: 226975 - DNA, 22 bp, Artificial Sequence
  Synthetic oligonucleotide; CTT chr2 60455467 60455488 60455472 60455467 -
agtctcctgacttattgacgcc

SEQ ID NO: 226976 - DNA, 22 bp, Artificial Sequence
  Synthetic oligonucleotide; TTA chr2 60455466 60455487 60455471 60455466 -
gtctcctgacttattgacgcct

SEQ ID NO: 226977 - DNA, 22 bp, Artificial Sequence
  Synthetic oligonucleotide; CTC chr2 60455461 60455482 60455466 60455461 -
ctgacttattgacgccttctga

SEQ ID NO: 226978 - DNA, 22 bp, Artificial Sequence
  Synthetic oligonucleotide; CTG chr2 60455458 60455479 60455463 60455458 -
acttattgacgccttctgataa

SEQ ID NO: 226979 - DNA, 22 bp, Artificial Sequence
  Synthetic oligonucleotide; CTT chr2 60455454 60455475 60455459 60455454 -
attgacgccttctgataaaata

SEQ ID NO: 226980 - DNA, 22 bp, Artificial Sequence
  Synthetic oligonucleotide; TTA chr2 60455453 60455474 60455458 60455453 -
ttgacgccttctgataaaatat

SEQ ID NO: 226981 - DNA, 22 bp, Artificial Sequence
  Synthetic oligonucleotide; TTG chr2 60455450 60455471 60455455 60455450 -
acgccttctgataaaatattat

SEQ ID NO: 226982 - DNA, 22 bp, Artificial Sequence
  Synthetic oligonucleotide; CTT chr2 60455443 60455464 60455448 60455443 -
ctgataaaatattatttctgaa

SEQ ID NO: 226983 - DNA, 22 bp, Artificial Sequence
  Synthetic oligonucleotide; TTC chr2 60455442 60455463 60455447 60455442 -
tgataaaatattatttctgaag

SEQ ID NO: 226984 - DNA, 22 bp, Artificial Sequence
  Synthetic oligonucleotide; CTG chr2 60455440 60455461 60455445 60455440 -
ataaaatattatttctgaagct

SEQ ID NO: 226985 - DNA, 22 bp, Artificial Sequence
  Synthetic oligonucleotide; TTA chr2 60455429 60455450 60455434 60455429 -
tttctgaagctgatgaacaata

SEQ ID NO: 226986 - DNA, 22 bp, Artificial Sequence
  Synthetic oligonucleotide; TTT chr2 60455426 60455447 60455431 60455426 -
ctgaagctgatgaacaatagaa

SEQ ID NO: 226987 - DNA, 22 bp, Artificial Sequence
  Synthetic oligonucleotide; TTC chr2 60455425 60455446 60455430 60455425 -
tgaagctgatgaacaatagaaa

SEQ ID NO: 226988 - DNA, 22 bp, Artificial Sequence
  Synthetic oligonucleotide; CTG chr2 60455423 60455444 60455428 60455423 -
aagctgatgaacaatagaaaca

SEQ ID NO: 226989 - DNA, 22 bp, Artificial Sequence
  Synthetic oligonucleotide; CTG chr2 60455417 60455438 60455422 60455417 -
atgaacaatagaaacatgagaa

SEQ ID NO: 226990 - DNA, 22 bp, Artificial Sequence
  Synthetic oligonucleotide; CTA chr2 60455391 60455412 60455396 60455391 -
gccaacatgatatcacttataa

SEQ ID NO: 226991 - DNA, 22 bp, Artificial Sequence
  Synthetic oligonucleotide; CTT chr2 60455373 60455394 60455378 60455373 -
ataaatgatattttgtatccag

SEQ ID NO: 226992 - DNA, 22 bp, Artificial Sequence
  Synthetic oligonucleotide; TTA chr2 60455372 60455393 60455377 60455372 -
taaatgatattttgtatccaga

SEQ ID NO: 226993 - DNA, 22 bp, Artificial Sequence
  Synthetic oligonucleotide; TTT chr2 60455360 60455381 60455365 60455360 -
tgtatccagaactctaaaattt

SEQ ID NO: 226994 - DNA, 22 bp, Artificial Sequence
  Synthetic oligonucleotide; TTT chr2 60455359 60455380 60455364 60455359 -
gtatccagaactctaaaattta

SEQ ID NO: 226995 - DNA, 22 bp, Artificial Sequence
  Synthetic oligonucleotide; TTG chr2 60455358 60455379 60455363 60455358 -
tatccagaactctaaaatttaa

SEQ ID NO: 226996 - DNA, 22 bp, Artificial Sequence
  Synthetic oligonucleotide; CTC chr2 60455346 60455367 60455351 60455346 -
taaaatttaaaatcttaatata

SEQ ID NO: 226997 - DNA, 22 bp, Artificial Sequence
  Synthetic oligonucleotide; CTA chr2 60455344 60455365 60455349 60455344 -
aaatttaaaatcttaatataaa

SEQ ID NO: 226998 - DNA, 22 bp, Artificial Sequence
  Synthetic oligonucleotide; TTT chr2 60455338 60455359 60455343 60455338 -
aaaatcttaatataaaataaca

SEQ ID NO: 226999 - DNA, 22 bp, Artificial Sequence
  Synthetic oligonucleotide; TTA chr2 60455337 60455358 60455342 60455337 -
aaatcttaatataaaataacat

SEQ ID NO: 227000 - DNA, 22 bp, Artificial Sequence
  Synthetic oligonucleotide; CTT chr2 60455330 60455351 60455335 60455330 -
aatataaaataacatgcacatt

SEQ ID NO: 227001 - DNA, 22 bp, Artificial Sequence
  Synthetic oligonucleotide; TTA chr2 60455329 60455350 60455334 60455329 -
atataaaataacatgcacattt

SEQ ID NO: 227002 - DNA, 22 bp, Artificial Sequence
  Synthetic oligonucleotide; TTT chr2 60455307 60455328 60455312 60455307 -
ccaatagtaagatgaattcatg

SEQ ID NO: 227003 - DNA, 22 bp, Artificial Sequence
  Synthetic oligonucleotide; TTC chr2 60455306 60455327 60455311 60455306 -
caatagtaagatgaattcatga

SEQ ID NO: 227004 - DNA, 22 bp, Artificial Sequence
  Synthetic oligonucleotide; TTC chr2 60455288 60455309 60455293 60455288 -
atgatcttttttttttaaatga

SEQ ID NO: 227005 - DNA, 22 bp, Artificial Sequence
  Synthetic oligonucleotide; CTT chr2 60455280 60455301 60455285 60455280 -
ttttttttaaatgaggaactac

SEQ ID NO: 227006 - DNA, 22 bp, Artificial Sequence
  Synthetic oligonucleotide; TTT chr2 60455279 60455300 60455284 60455279 -
tttttttaaatgaggaactact

SEQ ID NO: 227007 - DNA, 22 bp, Artificial Sequence
  Synthetic oligonucleotide; TTT chr2 60455278 60455299 60455283 60455278 -
ttttttaaatgaggaactacta

SEQ ID NO: 227008 - DNA, 22 bp, Artificial Sequence
  Synthetic oligonucleotide; TTT chr2 60455277 60455298 60455282 60455277 -
tttttaaatgaggaactactaa

SEQ ID NO: 227009 - DNA, 22 bp, Artificial Sequence
  Synthetic oligonucleotide; TTT chr2 60455276 60455297 60455281 60455276 -
ttttaaatgaggaactactaag

SEQ ID NO: 227010 - DNA, 22 bp, Artificial Sequence
  Synthetic oligonucleotide; TTT chr2 60455275 60455296 60455280 60455275 -
tttaaatgaggaactactaaga

SEQ ID NO: 227011 - DNA, 22 bp, Artificial Sequence
  Synthetic oligonucleotide; TTT chr2 60455274 60455295 60455279 60455274 -
ttaaatgaggaactactaagaa

SEQ ID NO: 227012 - DNA, 22 bp, Artificial Sequence
  Synthetic oligonucleotide; TTT chr2 60455273 60455294 60455278 60455273 -
taaatgaggaactactaagaac

SEQ ID NO: 227013 - DNA, 22 bp, Artificial Sequence
  Synthetic oligonucleotide; TTT chr2 60455272 60455293 60455277 60455272 -
aaatgaggaactactaagaaca

SEQ ID NO: 227014 - DNA, 22 bp, Artificial Sequence
  Synthetic oligonucleotide; TTA chr2 60455271 60455292 60455276 60455271 -
aatgaggaactactaagaacat

SEQ ID NO: 227015 - DNA, 22 bp, Artificial Sequence
  Synthetic oligonucleotide; CTA chr2 60455259 60455280 60455264 60455259 -
ctaagaacattaatgtctctta

SEQ ID NO: 227016 - DNA, 22 bp, Artificial Sequence
  Synthetic oligonucleotide; CTA chr2 60455256 60455277 60455261 60455256 -
agaacattaatgtctcttaaaa

SEQ ID NO: 227017 - DNA, 22 bp, Artificial Sequence
  Synthetic oligonucleotide; TTA chr2 60455247 60455268 60455252 60455247 -
atgtctcttaaaatcctcaagt

SEQ ID NO: 227018 - DNA, 22 bp, Artificial Sequence
  Synthetic oligonucleotide; CTC chr2 60455240 60455261 60455245 60455240 -
ttaaaatcctcaagtaagtttt

SEQ ID NO: 227019 - DNA, 22 bp, Artificial Sequence
  Synthetic oligonucleotide; CTT chr2 60455238 60455259 60455243 60455238 -
aaaatcctcaagtaagtttttg

SEQ ID NO: 227020 - DNA, 22 bp, Artificial Sequence
  Synthetic oligonucleotide; TTA chr2 60455237 60455258 60455242 60455237 -
aaatcctcaagtaagtttttgt

SEQ ID NO: 227021 - DNA, 22 bp, Artificial Sequence
  Synthetic oligonucleotide; CTC chr2 60455229 60455250 60455234 60455229 -
aagtaagtttttgtaacaggct

SEQ ID NO: 227022 - DNA, 22 bp, Artificial Sequence
  Synthetic oligonucleotide; TTT chr2 60455219 60455240 60455224 60455219 -
ttgtaacaggcttgacgtgctg

SEQ ID NO: 227023 - DNA, 22 bp, Artificial Sequence
  Synthetic oligonucleotide; TTT chr2 60455218 60455239 60455223 60455218 -
tgtaacaggcttgacgtgctga

SEQ ID NO: 227024 - DNA, 22 bp, Artificial Sequence
  Synthetic oligonucleotide; TTT chr2 60455217 60455238 60455222 60455217 -
gtaacaggcttgacgtgctgat

SEQ ID NO: 227025 - DNA, 22 bp, Artificial Sequence
  Synthetic oligonucleotide; TTG chr2 60455216 60455237 60455221 60455216 -
taacaggcttgacgtgctgatg

SEQ ID NO: 227026 - DNA, 22 bp, Artificial Sequence
  Synthetic oligonucleotide; CTT chr2 60455206 60455227 60455211 60455206 -
gacgtgctgatggaatgttctc

SEQ ID NO: 227027 - DNA, 22 bp, Artificial Sequence
  Synthetic oligonucleotide; TTG chr2 60455205 60455226 60455210 60455205 -
acgtgctgatggaatgttctct

SEQ ID NO: 227028 - DNA, 22 bp, Artificial Sequence
  Synthetic oligonucleotide; CTG chr2 60455197 60455218 60455202 60455197 -
atggaatgttctctacatacct

SEQ ID NO: 227029 - DNA, 22 bp, Artificial Sequence
  Synthetic oligonucleotide; TTC chr2 60455186 60455207 60455191 60455186 -
tctacatacctgaactgatgct

SEQ ID NO: 227030 - DNA, 22 bp, Artificial Sequence
  Synthetic oligonucleotide; CTC chr2 60455184 60455205 60455189 60455184 -
tacatacctgaactgatgctta

SEQ ID NO: 227031 - DNA, 22 bp, Artificial Sequence
  Synthetic oligonucleotide; CTA chr2 60455182 60455203 60455187 60455182 -
catacctgaactgatgcttaaa

SEQ ID NO: 227032 - DNA, 22 bp, Artificial Sequence
  Synthetic oligonucleotide; CTG chr2 60455174 60455195 60455179 60455174 -
aactgatgcttaaaatgttctt

SEQ ID NO: 227033 - DNA, 22 bp, Artificial Sequence
  Synthetic oligonucleotide; CTG chr2 60455169 60455190 60455174 60455169 -
atgcttaaaatgttctttttaa

SEQ ID NO: 227034 - DNA, 22 bp, Artificial Sequence
  Synthetic oligonucleotide; CTT chr2 60455163 60455184 60455168 60455163 -
aaaatgttctttttaatcttca

SEQ ID NO: 227035 - DNA, 22 bp, Artificial Sequence
  Synthetic oligonucleotide; TTA chr2 60455162 60455183 60455167 60455162 -
aaatgttctttttaatcttcat

SEQ ID NO: 227036 - DNA, 22 bp, Artificial Sequence
  Synthetic oligonucleotide; TTC chr2 60455154 60455175 60455159 60455154 -
tttttaatcttcatttgagaac

SEQ ID NO: 227037 - DNA, 22 bp, Artificial Sequence
  Synthetic oligonucleotide; CTT chr2 60455152 60455173 60455157 60455152 -
tttaatcttcatttgagaacaa

SEQ ID NO: 227038 - DNA, 22 bp, Artificial Sequence
  Synthetic oligonucleotide; TTT chr2 60455151 60455172 60455156 60455151 -
ttaatcttcatttgagaacaac

SEQ ID NO: 227039 - DNA, 22 bp, Artificial Sequence
  Synthetic oligonucleotide; TTT chr2 60455150 60455171 60455155 60455150 -
taatcttcatttgagaacaact

SEQ ID NO: 227040 - DNA, 22 bp, Artificial Sequence
  Synthetic oligonucleotide; TTT chr2 60455149 60455170 60455154 60455149 -
aatcttcatttgagaacaactt

SEQ ID NO: 227041 - DNA, 22 bp, Artificial Sequence
  Synthetic oligonucleotide; TTA chr2 60455148 60455169 60455153 60455148 -
atcttcatttgagaacaactta

SEQ ID NO: 227042 - DNA, 22 bp, Artificial Sequence
  Synthetic oligonucleotide; CTT chr2 60455143 60455164 60455148 60455143 -
catttgagaacaacttaataaa

SEQ ID NO: 227043 - DNA, 22 bp, Artificial Sequence
  Synthetic oligonucleotide; TTC chr2 60455142 60455163 60455147 60455142 -
atttgagaacaacttaataaac

SEQ ID NO: 227044 - DNA, 22 bp, Artificial Sequence
  Synthetic oligonucleotide; TTT chr2 60455138 60455159 60455143 60455138 -
gagaacaacttaataaacagga

SEQ ID NO: 227045 - DNA, 22 bp, Artificial Sequence
  Synthetic oligonucleotide; TTG chr2 60455137 60455158 60455142 60455137 -
agaacaacttaataaacaggaa

SEQ ID NO: 227046 - DNA, 22 bp, Artificial Sequence
  Synthetic oligonucleotide; CTT chr2 60455127 60455148 60455132 60455127 -
aataaacaggaataccgcaaat

SEQ ID NO: 227047 - DNA, 22 bp, Artificial Sequence
  Synthetic oligonucleotide; TTA chr2 60455126 60455147 60455131 60455126 -
ataaacaggaataccgcaaatt

SEQ ID NO: 227048 - DNA, 22 bp, Artificial Sequence
  Synthetic oligonucleotide; TTC chr2 60455103 60455124 60455108 60455103 -
tatttctcacagattttaaacc

SEQ ID NO: 227049 - DNA, 22 bp, Artificial Sequence
  Synthetic oligonucleotide; CTA chr2 60455101 60455122 60455106 60455101 -
tttctcacagattttaaaccag

SEQ ID NO: 227050 - DNA, 22 bp, Artificial Sequence
  Synthetic oligonucleotide; TTT chr2 60455098 60455119 60455103 60455098 -
ctcacagattttaaaccagaaa

SEQ ID NO: 227051 - DNA, 22 bp, Artificial Sequence
  Synthetic oligonucleotide; TTC chr2 60455097 60455118 60455102 60455097 -
tcacagattttaaaccagaaac

SEQ ID NO: 227052 - DNA, 22 bp, Artificial Sequence
  Synthetic oligonucleotide; CTC chr2 60455095 60455116 60455100 60455095 -
acagattttaaaccagaaactc

SEQ ID NO: 227053 - DNA, 22 bp, Artificial Sequence
  Synthetic oligonucleotide; TTT chr2 60455087 60455108 60455092 60455087 -
taaaccagaaactcttccagtg

SEQ ID NO: 227054 - DNA, 22 bp, Artificial Sequence
  Synthetic oligonucleotide; TTT chr2 60455086 60455107 60455091 60455086 -
aaaccagaaactcttccagtgc

SEQ ID NO: 227055 - DNA, 22 bp, Artificial Sequence
  Synthetic oligonucleotide; TTA chr2 60455085 60455106 60455090 60455085 -
aaccagaaactcttccagtgcc

SEQ ID NO: 227056 - DNA, 22 bp, Artificial Sequence
  Synthetic oligonucleotide; CTC chr2 60455073 60455094 60455078 60455073 -
ttccagtgcctatattacctcc

SEQ ID NO: 227057 - DNA, 22 bp, Artificial Sequence
  Synthetic oligonucleotide; CTT chr2 60455071 60455092 60455076 60455071 -
ccagtgcctatattacctcctt

SEQ ID NO: 227058 - DNA, 22 bp, Artificial Sequence
  Synthetic oligonucleotide; TTC chr2 60455070 60455091 60455075 60455070 -
cagtgcctatattacctccttc

SEQ ID NO: 227059 - DNA, 22 bp, Artificial Sequence
  Synthetic oligonucleotide; CTA chr2 60455061 60455082 60455066 60455061 -
tattacctccttcctgaaccca

SEQ ID NO: 227060 - DNA, 22 bp, Artificial Sequence
  Synthetic oligonucleotide; TTA chr2 60455056 60455077 60455061 60455056 -
cctccttcctgaacccatttgc

SEQ ID NO: 227061 - DNA, 22 bp, Artificial Sequence
  Synthetic oligonucleotide; CTC chr2 60455052 60455073 60455057 60455052 -
cttcctgaacccatttgctatc

SEQ ID NO: 227062 - DNA, 22 bp, Artificial Sequence
  Synthetic oligonucleotide; CTT chr2 60455049 60455070 60455054 60455049 -
cctgaacccatttgctatcctc

SEQ ID NO: 227063 - DNA, 22 bp, Artificial Sequence
  Synthetic oligonucleotide; TTC chr2 60455048 60455069 60455053 60455048 -
ctgaacccatttgctatcctct

SEQ ID NO: 227064 - DNA, 22 bp, Artificial Sequence
  Synthetic oligonucleotide; CTG chr2 60455045 60455066 60455050 60455045 -
aacccatttgctatcctctctt

SEQ ID NO: 227065 - DNA, 22 bp, Artificial Sequence
  Synthetic oligonucleotide; TTT chr2 60455036 60455057 60455041 60455036 -
gctatcctctctttgtttagga

SEQ ID NO: 227066 - DNA, 22 bp, Artificial Sequence
  Synthetic oligonucleotide; TTG chr2 60455035 60455056 60455040 60455035 -
ctatcctctctttgtttaggac

SEQ ID NO: 227067 - DNA, 22 bp, Artificial Sequence
  Synthetic oligonucleotide; CTA chr2 60455032 60455053 60455037 60455032 -
tcctctctttgtttaggaccta

SEQ ID NO: 227068 - DNA, 22 bp, Artificial Sequence
  Synthetic oligonucleotide; CTC chr2 60455027 60455048 60455032 60455027 -
tctttgtttaggacctacaaaa

SEQ ID NO: 227069 - DNA, 22 bp, Artificial Sequence
  Synthetic oligonucleotide; CTC chr2 60455025 60455046 60455030 60455025 -
tttgtttaggacctacaaaaag

SEQ ID NO: 227070 - DNA, 22 bp, Artificial Sequence
  Synthetic oligonucleotide; CTT chr2 60455023 60455044 60455028 60455023 -
tgtttaggacctacaaaaaggc

SEQ ID NO: 227071 - DNA, 22 bp, Artificial Sequence
  Synthetic oligonucleotide; TTT chr2 60455022 60455043 60455027 60455022 -
gtttaggacctacaaaaaggct

SEQ ID NO: 227072 - DNA, 22 bp, Artificial Sequence
  Synthetic oligonucleotide; TTG chr2 60455021 60455042 60455026 60455021 -
tttaggacctacaaaaaggctg

SEQ ID NO: 227073 - DNA, 22 bp, Artificial Sequence
  Synthetic oligonucleotide; TTT chr2 60455018 60455039 60455023 60455018 -
aggacctacaaaaaggctggaa

SEQ ID NO: 227074 - DNA, 22 bp, Artificial Sequence
  Synthetic oligonucleotide; TTA chr2 60455017 60455038 60455022 60455017 -
ggacctacaaaaaggctggaac

SEQ ID NO: 227075 - DNA, 22 bp, Artificial Sequence
  Synthetic oligonucleotide; CTA chr2 60455010 60455031 60455015 60455010 -
caaaaaggctggaaccaacaca

SEQ ID NO: 227076 - DNA, 22 bp, Artificial Sequence
  Synthetic oligonucleotide; CTG chr2 60454999 60455020 60455004 60454999 -
gaaccaacacattacaaaggtt

SEQ ID NO: 227077 - DNA, 22 bp, Artificial Sequence
  Synthetic oligonucleotide; TTA chr2 60454985 60455006 60454990 60454985 -
caaaggttgctaagaagtgagg

SEQ ID NO: 227078 - DNA, 22 bp, Artificial Sequence
  Synthetic oligonucleotide; TTG chr2 60454976 60454997 60454981 60454976 -
ctaagaagtgaggtgaacacag

SEQ ID NO: 227079 - DNA, 22 bp, Artificial Sequence
  Synthetic oligonucleotide; CTA chr2 60454973 60454994 60454978 60454973 -
agaagtgaggtgaacacagttc

SEQ ID NO: 227080 - DNA, 22 bp, Artificial Sequence
  Synthetic oligonucleotide; TTC chr2 60454951 60454972 60454956 60454951 -
ttcatttgcactggccatggca

SEQ ID NO: 227081 - DNA, 22 bp, Artificial Sequence
  Synthetic oligonucleotide; CTT chr2 60454949 60454970 60454954 60454949 -
catttgcactggccatggcaga

SEQ ID NO: 227082 - DNA, 22 bp, Artificial Sequence
  Synthetic oligonucleotide; TTC chr2 60454948 60454969 60454953 60454948 -
atttgcactggccatggcagaa

SEQ ID NO: 227083 - DNA, 22 bp, Artificial Sequence
  Synthetic oligonucleotide; TTT chr2 60454944 60454965 60454949 60454944 -
gcactggccatggcagaaagtg

SEQ ID NO: 227084 - DNA, 22 bp, Artificial Sequence
  Synthetic oligonucleotide; TTG chr2 60454943 60454964 60454948 60454943 -
cactggccatggcagaaagtgt

SEQ ID NO: 227085 - DNA, 22 bp, Artificial Sequence
  Synthetic oligonucleotide; CTG chr2 60454938 60454959 60454943 60454938 -
gccatggcagaaagtgtgaagt

SEQ ID NO: 227086 - DNA, 22 bp, Artificial Sequence
  Synthetic oligonucleotide; TTG chr2 60454911 60454932 60454916 60454911 -
agtttttcccagggcattctgt

SEQ ID NO: 227087 - DNA, 22 bp, Artificial Sequence
  Synthetic oligonucleotide; TTT chr2 60454906 60454927 60454911 60454906 -
ttcccagggcattctgtagata

SEQ ID NO: 227088 - DNA, 22 bp, Artificial Sequence
  Synthetic oligonucleotide; TTT chr2 60454905 60454926 60454910 60454905 -
tcccagggcattctgtagatat

SEQ ID NO: 227089 - DNA, 22 bp, Artificial Sequence
  Synthetic oligonucleotide; TTT chr2 60454904 60454925 60454909 60454904 -
cccagggcattctgtagatata

SEQ ID NO: 227090 - DNA, 22 bp, Artificial Sequence
  Synthetic oligonucleotide; TTC chr2 60454903 60454924 60454908 60454903 -
ccagggcattctgtagatatag

SEQ ID NO: 227091 - DNA, 22 bp, Artificial Sequence
  Synthetic oligonucleotide; TTC chr2 60454892 60454913 60454897 60454892 -
tgtagatatagaactgtttatt

SEQ ID NO: 227092 - DNA, 22 bp, Artificial Sequence
  Synthetic oligonucleotide; CTG chr2 60454890 60454911 60454895 60454890 -
tagatatagaactgtttattta

SEQ ID NO: 227093 - DNA, 22 bp, Artificial Sequence
  Synthetic oligonucleotide; CTG chr2 60454876 60454897 60454881 60454876 -
tttatttaaataccatttttgt

SEQ ID NO: 227094 - DNA, 22 bp, Artificial Sequence
  Synthetic oligonucleotide; TTT chr2 60454873 60454894 60454878 60454873 -
atttaaataccatttttgtata

SEQ ID NO: 227095 - DNA, 22 bp, Artificial Sequence
  Synthetic oligonucleotide; TTA chr2 60454872 60454893 60454877 60454872 -
tttaaataccatttttgtatat

SEQ ID NO: 227096 - DNA, 22 bp, Artificial Sequence
  Synthetic oligonucleotide; TTT chr2 60454869 60454890 60454874 60454869 -
aaataccatttttgtatatgca

SEQ ID NO: 227097 - DNA, 22 bp, Artificial Sequence
  Synthetic oligonucleotide; TTA chr2 60454868 60454889 60454873 60454868 -
aataccatttttgtatatgcaa

SEQ ID NO: 227098 - DNA, 22 bp, Artificial Sequence
  Synthetic oligonucleotide; TTT chr2 60454858 60454879 60454863 60454858 -
ttgtatatgcaataagtacata

SEQ ID NO: 227099 - DNA, 22 bp, Artificial Sequence
  Synthetic oligonucleotide; TTT chr2 60454857 60454878 60454862 60454857 -
tgtatatgcaataagtacatat

SEQ ID NO: 227100 - DNA, 22 bp, Artificial Sequence
  Synthetic oligonucleotide; TTT chr2 60454856 60454877 60454861 60454856 -
gtatatgcaataagtacatatt

SEQ ID NO: 227101 - DNA, 22 bp, Artificial Sequence
  Synthetic oligonucleotide; TTG chr2 60454855 60454876 60454860 60454855 -
tatatgcaataagtacatattg

SEQ ID NO: 227102 - DNA, 22 bp, Artificial Sequence
  Synthetic oligonucleotide; TTG chr2 60454833 60454854 60454838 60454833 -
tatataatcataatgctagaag

SEQ ID NO: 227103 - DNA, 22 bp, Artificial Sequence
  Synthetic oligonucleotide; CTA chr2 60454815 60454836 60454820 60454815 -
gaagtgagaacttgaaaggaag

SEQ ID NO: 227104 - DNA, 22 bp, Artificial Sequence
  Synthetic oligonucleotide; CTT chr2 60454802 60454823 60454807 60454802 -
gaaaggaagtggcgggagatgg

SEQ ID NO: 227105 - DNA, 22 bp, Artificial Sequence
  Synthetic oligonucleotide; TTG chr2 60454801 60454822 60454806 60454801 -
aaaggaagtggcgggagatggc

SEQ ID NO: 227106 - DNA, 22 bp, Artificial Sequence
  Synthetic oligonucleotide; CTT chr2 60454777 60454798 60454782 60454777 -
aggtataattccaattggagaa

SEQ ID NO: 227107 - DNA, 22 bp, Artificial Sequence
  Synthetic oligonucleotide; TTA chr2 60454776 60454797 60454781 60454776 -
ggtataattccaattggagaaa

SEQ ID NO: 227108 - DNA, 22 bp, Artificial Sequence
  Synthetic oligonucleotide; TTC chr2 60454766 60454787 60454771 60454766 -
caattggagaaataaggaaatg

SEQ ID NO: 227109 - DNA, 22 bp, Artificial Sequence
  Synthetic oligonucleotide; TTG chr2 60454760 60454781 60454765 60454760 -
gagaaataaggaaatgaggtgg

SEQ ID NO: 227110 - DNA, 22 bp, Artificial Sequence
  Synthetic oligonucleotide; TTT chr2 60454735 60454756 60454740 60454735 -
attcacagacacagtttgctga

SEQ ID NO: 227111 - DNA, 22 bp, Artificial Sequence
  Synthetic oligonucleotide; TTA chr2 60454734 60454755 60454739 60454734 -
ttcacagacacagtttgctgaa

SEQ ID NO: 227112 - DNA, 22 bp, Artificial Sequence
  Synthetic oligonucleotide; TTC chr2 60454731 60454752 60454736 60454731 -
acagacacagtttgctgaaagg

SEQ ID NO: 227113 - DNA, 22 bp, Artificial Sequence
  Synthetic oligonucleotide; TTT chr2 60454718 60454739 60454723 60454718 -
gctgaaaggtactgggattatt

SEQ ID NO: 227114 - DNA, 22 bp, Artificial Sequence
  Synthetic oligonucleotide; TTG chr2 60454717 60454738 60454722 60454717 -
ctgaaaggtactgggattattt

SEQ ID NO: 227115 - DNA, 22 bp, Artificial Sequence
  Synthetic oligonucleotide; CTG chr2 60454714 60454735 60454719 60454714 -
aaaggtactgggattatttcgg

SEQ ID NO: 227116 - DNA, 22 bp, Artificial Sequence
  Synthetic oligonucleotide; CTG chr2 60454704 60454725 60454709 60454704 -
ggattatttcgggccttcctga

SEQ ID NO: 227117 - DNA, 22 bp, Artificial Sequence
  Synthetic oligonucleotide; TTA chr2 60454698 60454719 60454703 60454698 -
tttcgggccttcctgaaaagga

SEQ ID NO: 227118 - DNA, 22 bp, Artificial Sequence
  Synthetic oligonucleotide; TTT chr2 60454695 60454716 60454700 60454695 -
cgggccttcctgaaaaggagtt

SEQ ID NO: 227119 - DNA, 22 bp, Artificial Sequence
  Synthetic oligonucleotide; TTC chr2 60454694 60454715 60454699 60454694 -
gggccttcctgaaaaggagttg

SEQ ID NO: 227120 - DNA, 22 bp, Artificial Sequence
  Synthetic oligonucleotide; CTT chr2 60454687 60454708 60454692 60454687 -
cctgaaaaggagttgagaagcc

SEQ ID NO: 227121 - DNA, 22 bp, Artificial Sequence
  Synthetic oligonucleotide; TTC chr2 60454686 60454707 60454691 60454686 -
ctgaaaaggagttgagaagcct

SEQ ID NO: 227122 - DNA, 22 bp, Artificial Sequence
  Synthetic oligonucleotide; CTG chr2 60454683 60454704 60454688 60454683 -
aaaaggagttgagaagcctcag

SEQ ID NO: 227123 - DNA, 22 bp, Artificial Sequence
  Synthetic oligonucleotide; TTG chr2 60454672 60454693 60454677 60454672 -
agaagcctcaggccccatcctc

SEQ ID NO: 227124 - DNA, 22 bp, Artificial Sequence
  Synthetic oligonucleotide; CTC chr2 60454663 60454684 60454668 60454663 -
aggccccatcctctcctgcttg

SEQ ID NO: 227125 - DNA, 22 bp, Artificial Sequence
  Synthetic oligonucleotide; CTC chr2 60454650 60454671 60454655 60454650 -
tcctgcttgtagtactttgctc

SEQ ID NO: 227126 - DNA, 22 bp, Artificial Sequence
  Synthetic oligonucleotide; CTC chr2 60454648 60454669 60454653 60454648 -
ctgcttgtagtactttgctcac

SEQ ID NO: 227127 - DNA, 22 bp, Artificial Sequence
  Synthetic oligonucleotide; CTG chr2 60454645 60454666 60454650 60454645 -
cttgtagtactttgctcacaga

SEQ ID NO: 227128 - DNA, 22 bp, Artificial Sequence
  Synthetic oligonucleotide; CTT chr2 60454642 60454663 60454647 60454642 -
gtagtactttgctcacagagac

SEQ ID NO: 227129 - DNA, 22 bp, Artificial Sequence
  Synthetic oligonucleotide; TTG chr2 60454641 60454662 60454646 60454641 -
tagtactttgctcacagagact

SEQ ID NO: 227130 - DNA, 22 bp, Artificial Sequence
  Synthetic oligonucleotide; CTT chr2 60454633 60454654 60454638 60454633 -
tgctcacagagactgagggagg

SEQ ID NO: 227131 - DNA, 22 bp, Artificial Sequence
  Synthetic oligonucleotide; TTT chr2 60454632 60454653 60454637 60454632 -
gctcacagagactgagggagga

SEQ ID NO: 227132 - DNA, 22 bp, Artificial Sequence
  Synthetic oligonucleotide; TTG chr2 60454631 60454652 60454636 60454631 -
ctcacagagactgagggaggaa

SEQ ID NO: 227133 - DNA, 22 bp, Artificial Sequence
  Synthetic oligonucleotide; CTC chr2 60454628 60454649 60454633 60454628 -
acagagactgagggaggaaata

SEQ ID NO: 227134 - DNA, 22 bp, Artificial Sequence
  Synthetic oligonucleotide; CTG chr2 60454618 60454639 60454623 60454618 -
agggaggaaatacagtgttttc

SEQ ID NO: 227135 - DNA, 22 bp, Artificial Sequence
  Synthetic oligonucleotide; TTT chr2 60454598 60454619 60454603 60454598 -
tcttgttttaagcctcttttcc

SEQ ID NO: 227136 - DNA, 22 bp, Artificial Sequence
  Synthetic oligonucleotide; TTT chr2 60454597 60454618 60454602 60454597 -
cttgttttaagcctcttttccc

SEQ ID NO: 227137 - DNA, 22 bp, Artificial Sequence
  Synthetic oligonucleotide; TTC chr2 60454596 60454617 60454601 60454596 -
ttgttttaagcctcttttcccc

SEQ ID NO: 227138 - DNA, 22 bp, Artificial Sequence
  Synthetic oligonucleotide; CTT chr2 60454594 60454615 60454599 60454594 -
gttttaagcctcttttccccct

SEQ ID NO: 227139 - DNA, 22 bp, Artificial Sequence
  Synthetic oligonucleotide; TTG chr2 60454593 60454614 60454598 60454593 -
ttttaagcctcttttccccctc

SEQ ID NO: 227140 - DNA, 22 bp, Artificial Sequence
  Synthetic oligonucleotide; TTT chr2 60454590 60454611 60454595 60454590 -
taagcctcttttccccctccgt

SEQ ID NO: 227141 - DNA, 22 bp, Artificial Sequence
  Synthetic oligonucleotide; TTT chr2 60454589 60454610 60454594 60454589 -
aagcctcttttccccctccgta

SEQ ID NO: 227142 - DNA, 22 bp, Artificial Sequence
  Synthetic oligonucleotide; TTA chr2 60454588 60454609 60454593 60454588 -
agcctcttttccccctccgtac

SEQ ID NO: 227143 - DNA, 22 bp, Artificial Sequence
  Synthetic oligonucleotide; CTC chr2 60454582 60454603 60454587 60454582 -
ttttccccctccgtacacacat

SEQ ID NO: 227144 - DNA, 22 bp, Artificial Sequence
  Synthetic oligonucleotide; CTT chr2 60454580 60454601 60454585 60454580 -
ttccccctccgtacacacatga

SEQ ID NO: 227145 - DNA, 22 bp, Artificial Sequence
  Synthetic oligonucleotide; TTT chr2 60454579 60454600 60454584 60454579 -
tccccctccgtacacacatgaa

SEQ ID NO: 227146 - DNA, 22 bp, Artificial Sequence
  Synthetic oligonucleotide; TTT chr2 60454578 60454599 60454583 60454578 -
ccccctccgtacacacatgaac

SEQ ID NO: 227147 - DNA, 22 bp, Artificial Sequence
  Synthetic oligonucleotide; TTC chr2 60454577 60454598 60454582 60454577 -
cccctccgtacacacatgaaca

SEQ ID NO: 227148 - DNA, 22 bp, Artificial Sequence
  Synthetic oligonucleotide; CTC chr2 60454571 60454592 60454576 60454571 -
cgtacacacatgaacatgactt

SEQ ID NO: 227149 - DNA, 22 bp, Artificial Sequence
  Synthetic oligonucleotide; CTT chr2 60454549 60454570 60454554 60454549 -
cttatgactgtgttgtaactgt

SEQ ID NO: 227150 - DNA, 22 bp, Artificial Sequence
  Synthetic oligonucleotide; TTC chr2 60454548 60454569 60454553 60454548 -
ttatgactgtgttgtaactgtg

SEQ ID NO: 227151 - DNA, 22 bp, Artificial Sequence
  Synthetic oligonucleotide; CTT chr2 60454546 60454567 60454551 60454546 -
atgactgtgttgtaactgtgtg

SEQ ID NO: 227152 - DNA, 22 bp, Artificial Sequence
  Synthetic oligonucleotide; TTA chr2 60454545 60454566 60454550 60454545 -
tgactgtgttgtaactgtgtgt

SEQ ID NO: 227153 - DNA, 22 bp, Artificial Sequence
  Synthetic oligonucleotide; CTG chr2 60454539 60454560 60454544 60454539 -
tgttgtaactgtgtgttcctca

SEQ ID NO: 227154 - DNA, 22 bp, Artificial Sequence
  Synthetic oligonucleotide; TTG chr2 60454534 60454555 60454539 60454534 -
taactgtgtgttcctcattacg

SEQ ID NO: 227155 - DNA, 22 bp, Artificial Sequence
  Synthetic oligonucleotide; CTG chr2 60454528 60454549 60454533 60454528 -
tgtgttcctcattacgattctg

SEQ ID NO: 227156 - DNA, 22 bp, Artificial Sequence
  Synthetic oligonucleotide; TTC chr2 60454521 60454542 60454526 60454521 -
ctcattacgattctgttactcc

SEQ ID NO: 227157 - DNA, 22 bp, Artificial Sequence
  Synthetic oligonucleotide; CTC chr2 60454518 60454539 60454523 60454518 -
attacgattctgttactccatt

SEQ ID NO: 227158 - DNA, 22 bp, Artificial Sequence
  Synthetic oligonucleotide; TTA chr2 60454514 60454535 60454519 60454514 -
cgattctgttactccattgtcc

SEQ ID NO: 227159 - DNA, 22 bp, Artificial Sequence
  Synthetic oligonucleotide; TTC chr2 60454508 60454529 60454513 60454508 -
tgttactccattgtccctgggc

SEQ ID NO: 227160 - DNA, 22 bp, Artificial Sequence
  Synthetic oligonucleotide; CTG chr2 60454506 60454527 60454511 60454506 -
ttactccattgtccctgggcct

SEQ ID NO: 227161 - DNA, 22 bp, Artificial Sequence
  Synthetic oligonucleotide; TTA chr2 60454503 60454524 60454508 60454503 -
ctccattgtccctgggcctggt

SEQ ID NO: 227162 - DNA, 22 bp, Artificial Sequence
  Synthetic oligonucleotide; CTC chr2 60454500 60454521 60454505 60454500 -
cattgtccctgggcctggtgtg

SEQ ID NO: 227163 - DNA, 22 bp, Artificial Sequence
  Synthetic oligonucleotide; TTG chr2 60454495 60454516 60454500 60454495 -
tccctgggcctggtgtgttcag

SEQ ID NO: 227164 - DNA, 22 bp, Artificial Sequence
  Synthetic oligonucleotide; CTG chr2 60454489 60454510 60454494 60454489 -
ggcctggtgtgttcaggaatgt

SEQ ID NO: 227165 - DNA, 22 bp, Artificial Sequence
  Synthetic oligonucleotide; CTG chr2 60454483 60454504 60454488 60454483 -
gtgtgttcaggaatgtacccat

SEQ ID NO: 227166 - DNA, 22 bp, Artificial Sequence
  Synthetic oligonucleotide; TTC chr2 60454475 60454496 60454480 60454475 -
aggaatgtacccatcccattct

SEQ ID NO: 227167 - DNA, 22 bp, Artificial Sequence
  Synthetic oligonucleotide; TTC chr2 60454454 60454475 60454459 60454454 -
tctttttttcagacaacttccc

SEQ ID NO: 227168 - DNA, 22 bp, Artificial Sequence
  Synthetic oligonucleotide; CTC chr2 60454452 60454473 60454457 60454452 -
tttttttcagacaacttcccat

SEQ ID NO: 227169 - DNA, 22 bp, Artificial Sequence
  Synthetic oligonucleotide; CTT chr2 60454450 60454471 60454455 60454450 -
tttttcagacaacttcccataa

SEQ ID NO: 227170 - DNA, 22 bp, Artificial Sequence
  Synthetic oligonucleotide; TTT chr2 60454449 60454470 60454454 60454449 -
ttttcagacaacttcccataaa

SEQ ID NO: 227171 - DNA, 22 bp, Artificial Sequence
  Synthetic oligonucleotide; TTT chr2 60454448 60454469 60454453 60454448 -
tttcagacaacttcccataaaa

SEQ ID NO: 227172 - DNA, 22 bp, Artificial Sequence
  Synthetic oligonucleotide; TTT chr2 60454447 60454468 60454452 60454447 -
ttcagacaacttcccataaaaa

SEQ ID NO: 227173 - DNA, 22 bp, Artificial Sequence
  Synthetic oligonucleotide; TTT chr2 60454446 60454467 60454451 60454446 -
tcagacaacttcccataaaaaa

SEQ ID NO: 227174 - DNA, 22 bp, Artificial Sequence
  Synthetic oligonucleotide; TTT chr2 60454445 60454466 60454450 60454445 -
cagacaacttcccataaaaaaa

SEQ ID NO: 227175 - DNA, 22 bp, Artificial Sequence
  Synthetic oligonucleotide; TTC chr2 60454444 60454465 60454449 60454444 -
agacaacttcccataaaaaaaa

SEQ ID NO: 227176 - DNA, 22 bp, Artificial Sequence
  Synthetic oligonucleotide; CTT chr2 60454435 60454456 60454440 60454435 -
cccataaaaaaaaaattgtggg

SEQ ID NO: 227177 - DNA, 22 bp, Artificial Sequence
  Synthetic oligonucleotide; TTC chr2 60454434 60454455 60454439 60454434 -
ccataaaaaaaaaattgtggga

SEQ ID NO: 227178 - DNA, 22 bp, Artificial Sequence
  Synthetic oligonucleotide; TTG chr2 60454417 60454438 60454422 60454417 -
tgggaactttgccgatatgagg

SEQ ID NO: 227179 - DNA, 22 bp, Artificial Sequence
  Synthetic oligonucleotide; CTT chr2 60454408 60454429 60454413 60454408 -
tgccgatatgaggatgggattg

SEQ ID NO: 227180 - DNA, 22 bp, Artificial Sequence
  Synthetic oligonucleotide; TTT chr2 60454407 60454428 60454412 60454407 -
gccgatatgaggatgggattgg

SEQ ID NO: 227181 - DNA, 22 bp, Artificial Sequence
  Synthetic oligonucleotide; TTG chr2 60454406 60454427 60454411 60454406 -
ccgatatgaggatgggattggc

SEQ ID NO: 227182 - DNA, 22 bp, Artificial Sequence
  Synthetic oligonucleotide; TTG chr2 60454386 60454407 60454391 60454386 -
gcagagttctctcaacctgctt

SEQ ID NO: 227183 - DNA, 22 bp, Artificial Sequence
  Synthetic oligonucleotide; TTC chr2 60454377 60454398 60454382 60454377 -
tctcaacctgcttggaaaaatg

SEQ ID NO: 227184 - DNA, 22 bp, Artificial Sequence
  Synthetic oligonucleotide; CTC chr2 60454375 60454396 60454380 60454375 -
tcaacctgcttggaaaaatgtt

SEQ ID NO: 227185 - DNA, 22 bp, Artificial Sequence
  Synthetic oligonucleotide; CTC chr2 60454373 60454394 60454378 60454373 -
aacctgcttggaaaaatgtttc

SEQ ID NO: 227186 - DNA, 22 bp, Artificial Sequence
  Synthetic oligonucleotide; CTG chr2 60454367 60454388 60454372 60454367 -
cttggaaaaatgtttcttaaaa

SEQ ID NO: 227187 - DNA, 22 bp, Artificial Sequence
  Synthetic oligonucleotide; CTT chr2 60454364 60454385 60454369 60454364 -
ggaaaaatgtttcttaaaagac

SEQ ID NO: 227188 - DNA, 22 bp, Artificial Sequence
  Synthetic oligonucleotide; TTG chr2 60454363 60454384 60454368 60454363 -
gaaaaatgtttcttaaaagact

SEQ ID NO: 227189 - DNA, 22 bp, Artificial Sequence
  Synthetic oligonucleotide; TTT chr2 60454352 60454373 60454357 60454352 -
cttaaaagactgctaactttta

SEQ ID NO: 227190 - DNA, 22 bp, Artificial Sequence
  Synthetic oligonucleotide; TTC chr2 60454351 60454372 60454356 60454351 -
ttaaaagactgctaacttttaa

SEQ ID NO: 227191 - DNA, 22 bp, Artificial Sequence
  Synthetic oligonucleotide; CTT chr2 60454349 60454370 60454354 60454349 -
aaaagactgctaacttttaaaa

SEQ ID NO: 227192 - DNA, 22 bp, Artificial Sequence
  Synthetic oligonucleotide; TTA chr2 60454348 60454369 60454353 60454348 -
aaagactgctaacttttaaaag

SEQ ID NO: 227193 - DNA, 22 bp, Artificial Sequence
  Synthetic oligonucleotide; CTG chr2 60454340 60454361 60454345 60454340 -
ctaacttttaaaaggcatgagc

SEQ ID NO: 227194 - DNA, 22 bp, Artificial Sequence
  Synthetic oligonucleotide; CTA chr2 60454337 60454358 60454342 60454337 -
acttttaaaaggcatgagccat

SEQ ID NO: 227195 - DNA, 22 bp, Artificial Sequence
  Synthetic oligonucleotide; CTT chr2 60454333 60454354 60454338 60454333 -
ttaaaaggcatgagccatctag

SEQ ID NO: 227196 - DNA, 22 bp, Artificial Sequence
  Synthetic oligonucleotide; TTT chr2 60454332 60454353 60454337 60454332 -
taaaaggcatgagccatctagc

SEQ ID NO: 227197 - DNA, 22 bp, Artificial Sequence
  Synthetic oligonucleotide; TTT chr2 60454331 60454352 60454336 60454331 -
aaaaggcatgagccatctagca

SEQ ID NO: 227198 - DNA, 22 bp, Artificial Sequence
  Synthetic oligonucleotide; TTA chr2 60454330 60454351 60454335 60454330 -
aaaggcatgagccatctagcag

SEQ ID NO: 227199 - DNA, 22 bp, Artificial Sequence
  Synthetic oligonucleotide; CTA chr2 60454312 60454333 60454317 60454312 -
gcagattttcctagttgtctcc

SEQ ID NO: 227200 - DNA, 22 bp, Artificial Sequence
  Synthetic oligonucleotide; TTT chr2 60454304 60454325 60454309 60454304 -
tcctagttgtctcctaaagccc

SEQ ID NO: 227201 - DNA, 22 bp, Artificial Sequence
  Synthetic oligonucleotide; TTT chr2 60454303 60454324 60454308 60454303 -
cctagttgtctcctaaagccct

SEQ ID NO: 227202 - DNA, 22 bp, Artificial Sequence
  Synthetic oligonucleotide; TTC chr2 60454302 60454323 60454307 60454302 -
ctagttgtctcctaaagccctg

SEQ ID NO: 227203 - DNA, 22 bp, Artificial Sequence
  Synthetic oligonucleotide; CTA chr2 60454299 60454320 60454304 60454299 -
gttgtctcctaaagccctgcat

SEQ ID NO: 227204 - DNA, 22 bp, Artificial Sequence
  Synthetic oligonucleotide; TTG chr2 60454295 60454316 60454300 60454295 -
tctcctaaagccctgcatattt

SEQ ID NO: 227205 - DNA, 22 bp, Artificial Sequence
  Synthetic oligonucleotide; CTC chr2 60454291 60454312 60454296 60454291 -
ctaaagccctgcatatttccca

SEQ ID NO: 227206 - DNA, 22 bp, Artificial Sequence
  Synthetic oligonucleotide; CTA chr2 60454288 60454309 60454293 60454288 -
aagccctgcatatttcccaata

SEQ ID NO: 227207 - DNA, 22 bp, Artificial Sequence
  Synthetic oligonucleotide; CTG chr2 60454280 60454301 60454285 60454280 -
catatttcccaatagaaaataa

SEQ ID NO: 227208 - DNA, 22 bp, Artificial Sequence
  Synthetic oligonucleotide; TTT chr2 60454273 60454294 60454278 60454273 -
cccaatagaaaataaacgaacc

SEQ ID NO: 227209 - DNA, 22 bp, Artificial Sequence
  Synthetic oligonucleotide; TTC chr2 60454272 60454293 60454277 60454272 -
ccaatagaaaataaacgaaccc

SEQ ID NO: 227210 - DNA, 22 bp, Artificial Sequence
  Synthetic oligonucleotide; TTG chr2 60454246 60454267 60454251 60454246 -
ttagagaaatggacatcagaac

SEQ ID NO: 227211 - DNA, 22 bp, Artificial Sequence
  Synthetic oligonucleotide; TTA chr2 60454243 60454264 60454248 60454243 -
gagaaatggacatcagaacaca

SEQ ID NO: 227212 - DNA, 22 bp, Artificial Sequence
  Synthetic oligonucleotide; TTG chr2 60454209 60454230 60454214 60454209 -
gtatgatgtgtatttactctag

SEQ ID NO: 227213 - DNA, 22 bp, Artificial Sequence
  Synthetic oligonucleotide; TTT chr2 60454194 60454215 60454199 60454194 -
actctagggctgctatagctat

SEQ ID NO: 227214 - DNA, 22 bp, Artificial Sequence
  Synthetic oligonucleotide; TTA chr2 60454193 60454214 60454198 60454193 -
ctctagggctgctatagctatg

SEQ ID NO: 227215 - DNA, 22 bp, Artificial Sequence
  Synthetic oligonucleotide; CTC chr2 60454190 60454211 60454195 60454190 -
tagggctgctatagctatgaac

SEQ ID NO: 227216 - DNA, 22 bp, Artificial Sequence
  Synthetic oligonucleotide; CTA chr2 60454188 60454209 60454193 60454188 -
gggctgctatagctatgaactg

SEQ ID NO: 227217 - DNA, 22 bp, Artificial Sequence
  Synthetic oligonucleotide; CTG chr2 60454182 60454203 60454187 60454182 -
ctatagctatgaactgtggaca

SEQ ID NO: 227218 - DNA, 22 bp, Artificial Sequence
  Synthetic oligonucleotide; CTA chr2 60454179 60454200 60454184 60454179 -
tagctatgaactgtggacatgg

SEQ ID NO: 227219 - DNA, 22 bp, Artificial Sequence
  Synthetic oligonucleotide; CTA chr2 60454173 60454194 60454178 60454173 -
tgaactgtggacatgggttgtc

SEQ ID NO: 227220 - DNA, 22 bp, Artificial Sequence
  Synthetic oligonucleotide; CTG chr2 60454166 60454187 60454171 60454166 -
tggacatgggttgtccggtctg

SEQ ID NO: 227221 - DNA, 22 bp, Artificial Sequence
  Synthetic oligonucleotide; TTG chr2 60454153 60454174 60454158 60454153 -
tccggtctgcacttctgcttgc

SEQ ID NO: 227222 - DNA, 22 bp, Artificial Sequence
  Synthetic oligonucleotide; CTG chr2 60454144 60454165 60454149 60454144 -
cacttctgcttgctggcatctc

SEQ ID NO: 227223 - DNA, 22 bp, Artificial Sequence
  Synthetic oligonucleotide; CTT chr2 60454139 60454160 60454144 60454139 -
ctgcttgctggcatctcgttat

SEQ ID NO: 227224 - DNA, 22 bp, Artificial Sequence
  Synthetic oligonucleotide; TTC chr2 60454138 60454159 60454143 60454138 -
tgcttgctggcatctcgttatc

SEQ ID NO: 227225 - DNA, 22 bp, Artificial Sequence
  Synthetic oligonucleotide; CTG chr2 60454136 60454157 60454141 60454136 -
cttgctggcatctcgttatccc

SEQ ID NO: 227226 - DNA, 22 bp, Artificial Sequence
  Synthetic oligonucleotide; CTT chr2 60454133 60454154 60454138 60454133 -
gctggcatctcgttatcccatt

SEQ ID NO: 227227 - DNA, 22 bp, Artificial Sequence
  Synthetic oligonucleotide; TTG chr2 60454132 60454153 60454137 60454132 -
ctggcatctcgttatcccatta

SEQ ID NO: 227228 - DNA, 22 bp, Artificial Sequence
  Synthetic oligonucleotide; CTG chr2 60454129 60454150 60454134 60454129 -
gcatctcgttatcccattagcc

SEQ ID NO: 227229 - DNA, 22 bp, Artificial Sequence
  Synthetic oligonucleotide; CTC chr2 60454122 60454143 60454127 60454122 -
gttatcccattagcccgctgtt

SEQ ID NO: 227230 - DNA, 22 bp, Artificial Sequence
  Synthetic oligonucleotide; TTA chr2 60454118 60454139 60454123 60454118 -
tcccattagcccgctgtttaat

SEQ ID NO: 227231 - DNA, 22 bp, Artificial Sequence
  Synthetic oligonucleotide; TTA chr2 60454110 60454131 60454115 60454110 -
gcccgctgtttaatttactaca

SEQ ID NO: 227232 - DNA, 22 bp, Artificial Sequence
  Synthetic oligonucleotide; CTG chr2 60454102 60454123 60454107 60454102 -
tttaatttactacatacagcac

SEQ ID NO: 227233 - DNA, 22 bp, Artificial Sequence
  Synthetic oligonucleotide; TTT chr2 60454099 60454120 60454104 60454099 -
aatttactacatacagcacgag

SEQ ID NO: 227234 - DNA, 22 bp, Artificial Sequence
  Synthetic oligonucleotide; TTA chr2 60454098 60454119 60454103 60454098 -
atttactacatacagcacgagg

SEQ ID NO: 227235 - DNA, 22 bp, Artificial Sequence
  Synthetic oligonucleotide; TTT chr2 60454094 60454115 60454099 60454094 -
actacatacagcacgaggccag

SEQ ID NO: 227236 - DNA, 22 bp, Artificial Sequence
  Synthetic oligonucleotide; TTA chr2 60454093 60454114 60454098 60454093 -
ctacatacagcacgaggccagt

SEQ ID NO: 227237 - DNA, 22 bp, Artificial Sequence
  Synthetic oligonucleotide; CTA chr2 60454090 60454111 60454095 60454090 -
catacagcacgaggccagtgac

SEQ ID NO: 227238 - DNA, 22 bp, Artificial Sequence
  Synthetic oligonucleotide; CTC chr2 60454066 60454087 60454071 60454066 -
agcctttaggggaatggggctg

SEQ ID NO: 227239 - DNA, 22 bp, Artificial Sequence
  Synthetic oligonucleotide; CTT chr2 60454060 60454081 60454065 60454060 -
taggggaatggggctgtttctc

SEQ ID NO: 227240 - DNA, 22 bp, Artificial Sequence
  Synthetic oligonucleotide; TTT chr2 60454059 60454080 60454064 60454059 -
aggggaatggggctgtttctct

SEQ ID NO: 227241 - DNA, 22 bp, Artificial Sequence
  Synthetic oligonucleotide; TTA chr2 60454058 60454079 60454063 60454058 -
ggggaatggggctgtttctctc

SEQ ID NO: 227242 - DNA, 22 bp, Artificial Sequence
  Synthetic oligonucleotide; CTG chr2 60454044 60454065 60454049 60454044 -
tttctctctctctctctctctt

SEQ ID NO: 227243 - DNA, 22 bp, Artificial Sequence
  Synthetic oligonucleotide; TTT chr2 60454041 60454062 60454046 60454041 -
ctctctctctctctctctttct

SEQ ID NO: 227244 - DNA, 22 bp, Artificial Sequence
  Synthetic oligonucleotide; TTC chr2 60454040 60454061 60454045 60454040 -
tctctctctctctctctttctc

SEQ ID NO: 227245 - DNA, 22 bp, Artificial Sequence
  Synthetic oligonucleotide; CTC chr2 60454038 60454059 60454043 60454038 -
tctctctctctctctttctctc

SEQ ID NO: 227246 - DNA, 22 bp, Artificial Sequence
  Synthetic oligonucleotide; CTC chr2 60454036 60454057 60454041 60454036 -
tctctctctctctttctctctc

SEQ ID NO: 227247 - DNA, 22 bp, Artificial Sequence
  Synthetic oligonucleotide; CTC chr2 60454034 60454055 60454039 60454034 -
tctctctctctttctctctctc

SEQ ID NO: 227248 - DNA, 22 bp, Artificial Sequence
  Synthetic oligonucleotide; CTC chr2 60454032 60454053 60454037 60454032 -
tctctctctttctctctctcta

SEQ ID NO: 227249 - DNA, 22 bp, Artificial Sequence
  Synthetic oligonucleotide; CTC chr2 60454030 60454051 60454035 60454030 -
tctctctttctctctctctatt

SEQ ID NO: 227250 - DNA, 22 bp, Artificial Sequence
  Synthetic oligonucleotide; CTC chr2 60454028 60454049 60454033 60454028 -
tctctttctctctctctatttc

SEQ ID NO: 227251 - DNA, 22 bp, Artificial Sequence
  Synthetic oligonucleotide; CTC chr2 60454026 60454047 60454031 60454026 -
tctttctctctctctatttccc

SEQ ID NO: 227252 - DNA, 22 bp, Artificial Sequence
  Synthetic oligonucleotide; CTC chr2 60454024 60454045 60454029 60454024 -
tttctctctctctatttcccag

SEQ ID NO: 227253 - DNA, 22 bp, Artificial Sequence
  Synthetic oligonucleotide; CTT chr2 60454022 60454043 60454027 60454022 -
tctctctctctatttcccagcg

SEQ ID NO: 227254 - DNA, 22 bp, Artificial Sequence
  Synthetic oligonucleotide; TTT chr2 60454021 60454042 60454026 60454021 -
ctctctctctatttcccagcgt

SEQ ID NO: 227255 - DNA, 22 bp, Artificial Sequence
  Synthetic oligonucleotide; TTC chr2 60454020 60454041 60454025 60454020 -
tctctctctatttcccagcgtc

SEQ ID NO: 227256 - DNA, 22 bp, Artificial Sequence
  Synthetic oligonucleotide; CTC chr2 60454018 60454039 60454023 60454018 -
tctctctatttcccagcgtcat

SEQ ID NO: 227257 - DNA, 22 bp, Artificial Sequence
  Synthetic oligonucleotide; CTC chr2 60454016 60454037 60454021 60454016 -
tctctatttcccagcgtcatct

SEQ ID NO: 227258 - DNA, 22 bp, Artificial Sequence
  Synthetic oligonucleotide; CTC chr2 60454014 60454035 60454019 60454014 -
tctatttcccagcgtcatctac

SEQ ID NO: 227259 - DNA, 22 bp, Artificial Sequence
  Synthetic oligonucleotide; CTC chr2 60454012 60454033 60454017 60454012 -
tatttcccagcgtcatctacgg

SEQ ID NO: 227260 - DNA, 22 bp, Artificial Sequence
  Synthetic oligonucleotide; CTA chr2 60454010 60454031 60454015 60454010 -
tttcccagcgtcatctacggtc

SEQ ID NO: 227261 - DNA, 22 bp, Artificial Sequence
  Synthetic oligonucleotide; TTT chr2 60454007 60454028 60454012 60454007 -
cccagcgtcatctacggtcatg

SEQ ID NO: 227262 - DNA, 22 bp, Artificial Sequence
  Synthetic oligonucleotide; TTC chr2 60454006 60454027 60454011 60454006 -
ccagcgtcatctacggtcatgg

SEQ ID NO: 227263 - DNA, 22 bp, Artificial Sequence
  Synthetic oligonucleotide; CTA chr2 60453993 60454014 60453998 60453993 -
cggtcatgggataccattaatt

SEQ ID NO: 227264 - DNA, 22 bp, Artificial Sequence
  Synthetic oligonucleotide; TTA chr2 60453974 60453995 60453979 60453974 -
attcctcccttccaaatgggaa

SEQ ID NO: 227265 - DNA, 22 bp, Artificial Sequence
  Synthetic oligonucleotide; TTC chr2 60453970 60453991 60453975 60453970 -
ctcccttccaaatgggaaagag

SEQ ID NO: 227266 - DNA, 22 bp, Artificial Sequence
  Synthetic oligonucleotide; CTC chr2 60453967 60453988 60453972 60453967 -
ccttccaaatgggaaagagacc

SEQ ID NO: 227267 - DNA, 22 bp, Artificial Sequence
  Synthetic oligonucleotide; CTT chr2 60453963 60453984 60453968 60453963 -
ccaaatgggaaagagaccaatc

SEQ ID NO: 227268 - DNA, 22 bp, Artificial Sequence
  Synthetic oligonucleotide; TTC chr2 60453962 60453983 60453967 60453962 -
caaatgggaaagagaccaatcc

SEQ ID NO: 227269 - DNA, 22 bp, Artificial Sequence
  Synthetic oligonucleotide; TTC chr2 60453935 60453956 60453940 60453935 -
acacgggtcattgtacttgaga

SEQ ID NO: 227270 - DNA, 22 bp, Artificial Sequence
  Synthetic oligonucleotide; TTG chr2 60453922 60453943 60453927 60453922 -
tacttgagaacctaaacttggc

SEQ ID NO: 227271 - DNA, 22 bp, Artificial Sequence
  Synthetic oligonucleotide; CTT chr2 60453917 60453938 60453922 60453917 -
gagaacctaaacttggctgaac

SEQ ID NO: 227272 - DNA, 22 bp, Artificial Sequence
  Synthetic oligonucleotide; TTG chr2 60453916 60453937 60453921 60453916 -
agaacctaaacttggctgaaca

SEQ ID NO: 227273 - DNA, 22 bp, Artificial Sequence
  Synthetic oligonucleotide; CTA chr2 60453908 60453929 60453913 60453908 -
aacttggctgaacacagctcga

SEQ ID NO: 227274 - DNA, 22 bp, Artificial Sequence
  Synthetic oligonucleotide; CTT chr2 60453903 60453924 60453908 60453903 -
ggctgaacacagctcgatggtt

SEQ ID NO: 227275 - DNA, 22 bp, Artificial Sequence
  Synthetic oligonucleotide; TTG chr2 60453902 60453923 60453907 60453902 -
gctgaacacagctcgatggttg

SEQ ID NO: 227276 - DNA, 22 bp, Artificial Sequence
  Synthetic oligonucleotide; CTG chr2 60453898 60453919 60453903 60453898 -
aacacagctcgatggttgatcc

SEQ ID NO: 227277 - DNA, 22 bp, Artificial Sequence
  Synthetic oligonucleotide; CTC chr2 60453888 60453909 60453893 60453888 -
gatggttgatccaaatacgttt

SEQ ID NO: 227278 - DNA, 22 bp, Artificial Sequence
  Synthetic oligonucleotide; TTG chr2 60453880 60453901 60453885 60453880 -
atccaaatacgtttttcctttc

SEQ ID NO: 227279 - DNA, 22 bp, Artificial Sequence
  Synthetic oligonucleotide; TTT chr2 60453866 60453887 60453871 60453866 -
ttcctttctgtaaagtggcaaa

SEQ ID NO: 227280 - DNA, 22 bp, Artificial Sequence
  Synthetic oligonucleotide; TTT chr2 60453865 60453886 60453870 60453865 -
tcctttctgtaaagtggcaaaa

SEQ ID NO: 227281 - DNA, 22 bp, Artificial Sequence
  Synthetic oligonucleotide; TTT chr2 60453864 60453885 60453869 60453864 -
cctttctgtaaagtggcaaaaa

SEQ ID NO: 227282 - DNA, 22 bp, Artificial Sequence
  Synthetic oligonucleotide; TTC chr2 60453863 60453884 60453868 60453863 -
ctttctgtaaagtggcaaaaac

SEQ ID NO: 227283 - DNA, 22 bp, Artificial Sequence
  Synthetic oligonucleotide; CTT chr2 60453860 60453881 60453865 60453860 -
tctgtaaagtggcaaaaactat

SEQ ID NO: 227284 - DNA, 22 bp, Artificial Sequence
  Synthetic oligonucleotide; TTT chr2 60453859 60453880 60453864 60453859 -
ctgtaaagtggcaaaaactatt

SEQ ID NO: 227285 - DNA, 22 bp, Artificial Sequence
  Synthetic oligonucleotide; TTC chr2 60453858 60453879 60453863 60453858 -
tgtaaagtggcaaaaactattt

SEQ ID NO: 227286 - DNA, 22 bp, Artificial Sequence
  Synthetic oligonucleotide; CTG chr2 60453856 60453877 60453861 60453856 -
taaagtggcaaaaactatttca

SEQ ID NO: 227287 - DNA, 22 bp, Artificial Sequence
  Synthetic oligonucleotide; CTA chr2 60453839 60453860 60453844 60453839 -
tttcaagggagcacgtgtatca

SEQ ID NO: 227288 - DNA, 22 bp, Artificial Sequence
  Synthetic oligonucleotide; TTT chr2 60453836 60453857 60453841 60453836 -
caagggagcacgtgtatcagat

SEQ ID NO: 227289 - DNA, 22 bp, Artificial Sequence
  Synthetic oligonucleotide; TTC chr2 60453835 60453856 60453840 60453835 -
aagggagcacgtgtatcagatc

SEQ ID NO: 227290 - DNA, 22 bp, Artificial Sequence
  Synthetic oligonucleotide; CTT chr2 60453811 60453832 60453816 60453811 -
tcatagggatggtagaaaaggc

SEQ ID NO: 227291 - DNA, 22 bp, Artificial Sequence
  Synthetic oligonucleotide; TTT chr2 60453810 60453831 60453815 60453810 -
catagggatggtagaaaaggca

SEQ ID NO: 227292 - DNA, 22 bp, Artificial Sequence
  Synthetic oligonucleotide; TTC chr2 60453809 60453830 60453814 60453809 -
atagggatggtagaaaaggcaa

SEQ ID NO: 227293 - DNA, 22 bp, Artificial Sequence
  Synthetic oligonucleotide; TTA chr2 60453783 60453804 60453788 60453783 -
agccatttccccaagtatcctc

SEQ ID NO: 227294 - DNA, 22 bp, Artificial Sequence
  Synthetic oligonucleotide; TTT chr2 60453775 60453796 60453780 60453775 -
ccccaagtatcctctaaagcgg

SEQ ID NO: 227295 - DNA, 22 bp, Artificial Sequence
  Synthetic oligonucleotide; TTC chr2 60453774 60453795 60453779 60453774 -
cccaagtatcctctaaagcggg

SEQ ID NO: 227296 - DNA, 22 bp, Artificial Sequence
  Synthetic oligonucleotide; CTC chr2 60453761 60453782 60453766 60453761 -
taaagcgggagcccctaaaccc

SEQ ID NO: 227297 - DNA, 22 bp, Artificial Sequence
  Synthetic oligonucleotide; CTA chr2 60453759 60453780 60453764 60453759 -
aagcgggagcccctaaacccat

SEQ ID NO: 227298 - DNA, 22 bp, Artificial Sequence
  Synthetic oligonucleotide; CTA chr2 60453744 60453765 60453749 60453744 -
aacccataggggggctgtgctt

SEQ ID NO: 227299 - DNA, 22 bp, Artificial Sequence
  Synthetic oligonucleotide; CTG chr2 60453727 60453748 60453732 60453727 -
tgcttttaaatagctgtgaacg

SEQ ID NO: 227300 - DNA, 22 bp, Artificial Sequence
  Synthetic oligonucleotide; CTT chr2 60453722 60453743 60453727 60453722 -
ttaaatagctgtgaacgtggta

SEQ ID NO: 227301 - DNA, 22 bp, Artificial Sequence
  Synthetic oligonucleotide; TTT chr2 60453721 60453742 60453726 60453721 -
taaatagctgtgaacgtggtac

SEQ ID NO: 227302 - DNA, 22 bp, Artificial Sequence
  Synthetic oligonucleotide; TTT chr2 60453720 60453741 60453725 60453720 -
aaatagctgtgaacgtggtaca

SEQ ID NO: 227303 - DNA, 22 bp, Artificial Sequence
  Synthetic oligonucleotide; TTA chr2 60453719 60453740 60453724 60453719 -
aatagctgtgaacgtggtacat

SEQ ID NO: 227304 - DNA, 22 bp, Artificial Sequence
  Synthetic oligonucleotide; CTG chr2 60453711 60453732 60453716 60453711 -
tgaacgtggtacatgcccatga

SEQ ID NO: 227305 - DNA, 22 bp, Artificial Sequence
  Synthetic oligonucleotide; CTT chr2 60453682 60453703 60453687 60453682 -
tgtctattagaatttgaatatt

SEQ ID NO: 227306 - DNA, 22 bp, Artificial Sequence
  Synthetic oligonucleotide; TTT chr2 60453681 60453702 60453686 60453681 -
gtctattagaatttgaatattg

SEQ ID NO: 227307 - DNA, 22 bp, Artificial Sequence
  Synthetic oligonucleotide; TTG chr2 60453680 60453701 60453685 60453680 -
tctattagaatttgaatattgg

SEQ ID NO: 227308 - DNA, 22 bp, Artificial Sequence
  Synthetic oligonucleotide; CTA chr2 60453676 60453697 60453681 60453676 -
ttagaatttgaatattggtagc

SEQ ID NO: 227309 - DNA, 22 bp, Artificial Sequence
  Synthetic oligonucleotide; TTA chr2 60453673 60453694 60453678 60453673 -
gaatttgaatattggtagcagg

SEQ ID NO: 227310 - DNA, 22 bp, Artificial Sequence
  Synthetic oligonucleotide; TTT chr2 60453667 60453688 60453672 60453667 -
gaatattggtagcaggttggac

SEQ ID NO: 227311 - DNA, 22 bp, Artificial Sequence
  Synthetic oligonucleotide; TTG chr2 60453666 60453687 60453671 60453666 -
aatattggtagcaggttggacg

SEQ ID NO: 227312 - DNA, 22 bp, Artificial Sequence
  Synthetic oligonucleotide; TTG chr2 60453659 60453680 60453664 60453659 -
gtagcaggttggacgaaagggt

SEQ ID NO: 227313 - DNA, 22 bp, Artificial Sequence
  Synthetic oligonucleotide; TTG chr2 60453648 60453669 60453653 60453648 -
gacgaaagggtttgattggggt

SEQ ID NO: 227314 - DNA, 22 bp, Artificial Sequence
  Synthetic oligonucleotide; TTT chr2 60453635 60453656 60453640 60453635 -
gattggggtatcagctaaaggg

SEQ ID NO: 227315 - DNA, 22 bp, Artificial Sequence
  Synthetic oligonucleotide; TTG chr2 60453634 60453655 60453639 60453634 -
attggggtatcagctaaagggg

SEQ ID NO: 227316 - DNA, 22 bp, Artificial Sequence
  Synthetic oligonucleotide; TTG chr2 60453630 60453651 60453635 60453630 -
gggtatcagctaaaggggcctc

SEQ ID NO: 227317 - DNA, 22 bp, Artificial Sequence
  Synthetic oligonucleotide; CTA chr2 60453618 60453639 60453623 60453618 -
aaggggcctcgacgacagtgac

SEQ ID NO: 227318 - DNA, 22 bp, Artificial Sequence
  Synthetic oligonucleotide; CTC chr2 60453608 60453629 60453613 60453608 -
gacgacagtgacttagcgctgg

SEQ ID NO: 227319 - DNA, 22 bp, Artificial Sequence
  Synthetic oligonucleotide; CTT chr2 60453594 60453615 60453599 60453594 -
agcgctggactgggaatgggat

SEQ ID NO: 227320 - DNA, 22 bp, Artificial Sequence
  Synthetic oligonucleotide; TTA chr2 60453593 60453614 60453598 60453593 -
gcgctggactgggaatgggatt

SEQ ID NO: 227321 - DNA, 22 bp, Artificial Sequence
  Synthetic oligonucleotide; CTG chr2 60453587 60453608 60453592 60453587 -
gactgggaatgggattccccag

SEQ ID NO: 227322 - DNA, 22 bp, Artificial Sequence
  Synthetic oligonucleotide; CTG chr2 60453582 60453603 60453587 60453582 -
ggaatgggattccccagaaccc

SEQ ID NO: 227323 - DNA, 22 bp, Artificial Sequence
  Synthetic oligonucleotide; TTC chr2 60453570 60453591 60453575 60453570 -
cccagaacccacctggacgcag

SEQ ID NO: 227324 - DNA, 22 bp, Artificial Sequence
  Synthetic oligonucleotide; CTG chr2 60453555 60453576 60453560 60453555 -
gacgcagcatgcccctcagccc

SEQ ID NO: 227325 - DNA, 22 bp, Artificial Sequence
  Synthetic oligonucleotide; CTC chr2 60453538 60453559 60453543 60453538 -
agcccaggtctccgctgctctg

SEQ ID NO: 227326 - DNA, 22 bp, Artificial Sequence
  Synthetic oligonucleotide; CTC chr2 60453526 60453547 60453531 60453526 -
cgctgctctgctcaggggtggg

SEQ ID NO: 227327 - DNA, 22 bp, Artificial Sequence
  Synthetic oligonucleotide; CTG chr2 60453521 60453542 60453526 60453521 -
ctctgctcaggggtgggatgcg

SEQ ID NO: 227328 - DNA, 22 bp, Artificial Sequence
  Synthetic oligonucleotide; CTC chr2 60453518 60453539 60453523 60453518 -
tgctcaggggtgggatgcgtga

SEQ ID NO: 227329 - DNA, 22 bp, Artificial Sequence
  Synthetic oligonucleotide; CTG chr2 60453516 60453537 60453521 60453516 -
ctcaggggtgggatgcgtgaga

SEQ ID NO: 227330 - DNA, 22 bp, Artificial Sequence
  Synthetic oligonucleotide; CTC chr2 60453513 60453534 60453518 60453513 -
aggggtgggatgcgtgagagca

SEQ ID NO: 227331 - DNA, 22 bp, Artificial Sequence
  Synthetic oligonucleotide; CTG chr2 60453487 60453508 60453492 60453487 -
agatccagaccccgggcctcct

SEQ ID NO: 227332 - DNA, 22 bp, Artificial Sequence
  Synthetic oligonucleotide; CTC chr2 60453467 60453488 60453472 60453467 -
ctgcggcgccaagtcaggggag

SEQ ID NO: 227333 - DNA, 22 bp, Artificial Sequence
  Synthetic oligonucleotide; CTG chr2 60453464 60453485 60453469 60453464 -
cggcgccaagtcaggggagagg

SEQ ID NO: 227334 - DNA, 22 bp, Artificial Sequence
  Synthetic oligonucleotide; CTG chr2 60453426 60453447 60453431 60453426 -
cttcgggtcgccatggcaacga

SEQ ID NO: 227335 - DNA, 22 bp, Artificial Sequence
  Synthetic oligonucleotide; CTT chr2 60453423 60453444 60453428 60453423 -
cgggtcgccatggcaacgaggc

SEQ ID NO: 227336 - DNA, 22 bp, Artificial Sequence
  Synthetic oligonucleotide; TTC chr2 60453422 60453443 60453427 60453422 -
gggtcgccatggcaacgaggcc

SEQ ID NO: 227337 - DNA, 22 bp, Artificial Sequence
  Synthetic oligonucleotide; CTG chr2 60453398 60453419 60453403 60453398 -
gaatgccacagtggtagccctc

SEQ ID NO: 227338 - DNA, 22 bp, Artificial Sequence
  Synthetic oligonucleotide; CTC chr2 60453376 60453397 60453381 60453376 -
ttcctcggcacatccggactcc

SEQ ID NO: 227339 - DNA, 22 bp, Artificial Sequence
  Synthetic oligonucleotide; CTT chr2 60453374 60453395 60453379 60453374 -
cctcggcacatccggactccca

SEQ ID NO: 227340 - DNA, 22 bp, Artificial Sequence
  Synthetic oligonucleotide; TTC chr2 60453373 60453394 60453378 60453373 -
ctcggcacatccggactcccag

SEQ ID NO: 227341 - DNA, 22 bp, Artificial Sequence
  Synthetic oligonucleotide; CTC chr2 60453370 60453391 60453375 60453370 -
ggcacatccggactcccagttc

SEQ ID NO: 227342 - DNA, 22 bp, Artificial Sequence
  Synthetic oligonucleotide; CTC chr2 60453355 60453376 60453360 60453355 -
ccagttctgctgcttcaagtca

SEQ ID NO: 227343 - DNA, 22 bp, Artificial Sequence
  Synthetic oligonucleotide; TTC chr2 60453348 60453369 60453353 60453348 -
tgctgcttcaagtcaatgtcca

SEQ ID NO: 227344 - DNA, 22 bp, Artificial Sequence
  Synthetic oligonucleotide; CTG chr2 60453346 60453367 60453351 60453346 -
ctgcttcaagtcaatgtccaca

SEQ ID NO: 227345 - DNA, 22 bp, Artificial Sequence
  Synthetic oligonucleotide; CTG chr2 60453343 60453364 60453348 60453343 -
cttcaagtcaatgtccacagca

SEQ ID NO: 227346 - DNA, 22 bp, Artificial Sequence
  Synthetic oligonucleotide; CTT chr2 60453340 60453361 60453345 60453340 -
caagtcaatgtccacagcaagg

SEQ ID NO: 227347 - DNA, 22 bp, Artificial Sequence
  Synthetic oligonucleotide; TTC chr2 60453339 60453360 60453344 60453339 -
aagtcaatgtccacagcaaggg

SEQ ID NO: 227348 - DNA, 22 bp, Artificial Sequence
  Synthetic oligonucleotide; CTC chr2 60453290 60453311 60453295 60453290 -
ccttcttcccttcaccattgcc

SEQ ID NO: 227349 - DNA, 22 bp, Artificial Sequence
  Synthetic oligonucleotide; CTT chr2 60453286 60453307 60453291 60453286 -
cttcccttcaccattgccttcc

SEQ ID NO: 227350 - DNA, 22 bp, Artificial Sequence
  Synthetic oligonucleotide; TTC chr2 60453285 60453306 60453290 60453285 -
ttcccttcaccattgccttccc

SEQ ID NO: 227351 - DNA, 22 bp, Artificial Sequence
  Synthetic oligonucleotide; CTT chr2 60453283 60453304 60453288 60453283 -
cccttcaccattgccttccccc

SEQ ID NO: 227352 - DNA, 22 bp, Artificial Sequence
  Synthetic oligonucleotide; TTC chr2 60453282 60453303 60453287 60453282 -
ccttcaccattgccttccccct

SEQ ID NO: 227353 - DNA, 22 bp, Artificial Sequence
  Synthetic oligonucleotide; CTT chr2 60453278 60453299 60453283 60453278 -
caccattgccttcccccttcca

SEQ ID NO: 227354 - DNA, 22 bp, Artificial Sequence
  Synthetic oligonucleotide; TTC chr2 60453277 60453298 60453282 60453277 -
accattgccttcccccttccaa

SEQ ID NO: 227355 - DNA, 22 bp, Artificial Sequence
  Synthetic oligonucleotide; TTG chr2 60453270 60453291 60453275 60453270 -
ccttcccccttccaaaaaagaa

SEQ ID NO: 227356 - DNA, 22 bp, Artificial Sequence
  Synthetic oligonucleotide; CTT chr2 60453266 60453287 60453271 60453266 -
cccccttccaaaaaagaaaaga

SEQ ID NO: 227357 - DNA, 22 bp, Artificial Sequence
  Synthetic oligonucleotide; TTC chr2 60453265 60453286 60453270 60453265 -
ccccttccaaaaaagaaaagaa

SEQ ID NO: 227358 - DNA, 22 bp, Artificial Sequence
  Synthetic oligonucleotide; CTT chr2 60453259 60453280 60453264 60453259 -
ccaaaaaagaaaagaaaactgc

SEQ ID NO: 227359 - DNA, 22 bp, Artificial Sequence
  Synthetic oligonucleotide; TTC chr2 60453258 60453279 60453263 60453258 -
caaaaaagaaaagaaaactgca

SEQ ID NO: 227360 - DNA, 22 bp, Artificial Sequence
  Synthetic oligonucleotide; CTG chr2 60453238 60453259 60453243 60453238 -
catgtttgaaagaaactacagg

SEQ ID NO: 227361 - DNA, 22 bp, Artificial Sequence
  Synthetic oligonucleotide; TTT chr2 60453231 60453252 60453236 60453231 -
gaaagaaactacaggcagtttt

SEQ ID NO: 227362 - DNA, 22 bp, Artificial Sequence
  Synthetic oligonucleotide; TTG chr2 60453230 60453251 60453235 60453230 -
aaagaaactacaggcagttttt

SEQ ID NO: 227363 - DNA, 22 bp, Artificial Sequence
  Synthetic oligonucleotide; CTA chr2 60453220 60453241 60453225 60453220 -
caggcagtttttggtgcaattt

SEQ ID NO: 227364 - DNA, 22 bp, Artificial Sequence
  Synthetic oligonucleotide; TTT chr2 60453210 60453231 60453215 60453210 -
ttggtgcaatttgagagcaact

SEQ ID NO: 227365 - DNA, 22 bp, Artificial Sequence
  Synthetic oligonucleotide; TTT chr2 60453209 60453230 60453214 60453209 -
tggtgcaatttgagagcaactc

SEQ ID NO: 227366 - DNA, 22 bp, Artificial Sequence
  Synthetic oligonucleotide; TTT chr2 60453208 60453229 60453213 60453208 -
ggtgcaatttgagagcaactct

SEQ ID NO: 227367 - DNA, 22 bp, Artificial Sequence
  Synthetic oligonucleotide; TTG chr2 60453207 60453228 60453212 60453207 -
gtgcaatttgagagcaactctt

SEQ ID NO: 227368 - DNA, 22 bp, Artificial Sequence
  Synthetic oligonucleotide; TTT chr2 60453198 60453219 60453203 60453198 -
gagagcaactcttttgggttct

SEQ ID NO: 227369 - DNA, 22 bp, Artificial Sequence
  Synthetic oligonucleotide; TTG chr2 60453197 60453218 60453202 60453197 -
agagcaactcttttgggttctg

SEQ ID NO: 227370 - DNA, 22 bp, Artificial Sequence
  Synthetic oligonucleotide; CTC chr2 60453187 60453208 60453192 60453187 -
ttttgggttctggttttctctt

SEQ ID NO: 227371 - DNA, 22 bp, Artificial Sequence
  Synthetic oligonucleotide; CTT chr2 60453185 60453206 60453190 60453185 -
ttgggttctggttttctcttca

SEQ ID NO: 227372 - DNA, 22 bp, Artificial Sequence
  Synthetic oligonucleotide; TTT chr2 60453184 60453205 60453189 60453184 -
tgggttctggttttctcttcag

SEQ ID NO: 227373 - DNA, 22 bp, Artificial Sequence
  Synthetic oligonucleotide; TTT chr2 60453183 60453204 60453188 60453183 -
gggttctggttttctcttcaga

SEQ ID NO: 227374 - DNA, 22 bp, Artificial Sequence
  Synthetic oligonucleotide; TTG chr2 60453182 60453203 60453187 60453182 -
ggttctggttttctcttcagag

SEQ ID NO: 227375 - DNA, 22 bp, Artificial Sequence
  Synthetic oligonucleotide; TTC chr2 60453177 60453198 60453182 60453177 -
tggttttctcttcagagatttg

SEQ ID NO: 227376 - DNA, 22 bp, Artificial Sequence
  Synthetic oligonucleotide; CTG chr2 60453175 60453196 60453180 60453175 -
gttttctcttcagagatttgtt

SEQ ID NO: 227377 - DNA, 22 bp, Artificial Sequence
  Synthetic oligonucleotide; TTT chr2 60453171 60453192 60453176 60453171 -
tctcttcagagatttgttcgcc

SEQ ID NO: 227378 - DNA, 22 bp, Artificial Sequence
  Synthetic oligonucleotide; TTT chr2 60453170 60453191 60453175 60453170 -
ctcttcagagatttgttcgcct

SEQ ID NO: 227379 - DNA, 22 bp, Artificial Sequence
  Synthetic oligonucleotide; TTC chr2 60453169 60453190 60453174 60453169 -
tcttcagagatttgttcgcctc

SEQ ID NO: 227380 - DNA, 22 bp, Artificial Sequence
  Synthetic oligonucleotide; CTC chr2 60453167 60453188 60453172 60453167 -
ttcagagatttgttcgcctctt

SEQ ID NO: 227381 - DNA, 22 bp, Artificial Sequence
  Synthetic oligonucleotide; CTT chr2 60453165 60453186 60453170 60453165 -
cagagatttgttcgcctcttgt

SEQ ID NO: 227382 - DNA, 22 bp, Artificial Sequence
  Synthetic oligonucleotide; TTC chr2 60453164 60453185 60453169 60453164 -
agagatttgttcgcctcttgta

SEQ ID NO: 227383 - DNA, 22 bp, Artificial Sequence
  Synthetic oligonucleotide; TTT chr2 60453156 60453177 60453161 60453156 -
gttcgcctcttgtaaatcattg

SEQ ID NO: 227384 - DNA, 22 bp, Artificial Sequence
  Synthetic oligonucleotide; TTG chr2 60453155 60453176 60453160 60453155 -
ttcgcctcttgtaaatcattgg

SEQ ID NO: 227385 - DNA, 22 bp, Artificial Sequence
  Synthetic oligonucleotide; TTC chr2 60453152 60453173 60453157 60453152 -
gcctcttgtaaatcattggctg

SEQ ID NO: 227386 - DNA, 22 bp, Artificial Sequence
  Synthetic oligonucleotide; CTC chr2 60453147 60453168 60453152 60453147 -
ttgtaaatcattggctgctttg

SEQ ID NO: 227387 - DNA, 22 bp, Artificial Sequence
  Synthetic oligonucleotide; CTT chr2 60453145 60453166 60453150 60453145 -
gtaaatcattggctgctttgac

SEQ ID NO: 227388 - DNA, 22 bp, Artificial Sequence
  Synthetic oligonucleotide; TTG chr2 60453144 60453165 60453149 60453144 -
taaatcattggctgctttgacg

SEQ ID NO: 227389 - DNA, 22 bp, Artificial Sequence
  Synthetic oligonucleotide; TTG chr2 60453134 60453155 60453139 60453134 -
gctgctttgacgttgaacttga

SEQ ID NO: 227390 - DNA, 22 bp, Artificial Sequence
  Synthetic oligonucleotide; CTG chr2 60453130 60453151 60453135 60453130 -
ctttgacgttgaacttgatgac

SEQ ID NO: 227391 - DNA, 22 bp, Artificial Sequence
  Synthetic oligonucleotide; CTT chr2 60453127 60453148 60453132 60453127 -
tgacgttgaacttgatgacatt

SEQ ID NO: 227392 - DNA, 22 bp, Artificial Sequence
  Synthetic oligonucleotide; TTT chr2 60453126 60453147 60453131 60453126 -
gacgttgaacttgatgacattt

SEQ ID NO: 227393 - DNA, 22 bp, Artificial Sequence
  Synthetic oligonucleotide; TTG chr2 60453125 60453146 60453130 60453125 -
acgttgaacttgatgacatttc

SEQ ID NO: 227394 - DNA, 22 bp, Artificial Sequence
  Synthetic oligonucleotide; TTG chr2 60453119 60453140 60453124 60453119 -
aacttgatgacatttcatgttt

SEQ ID NO: 227395 - DNA, 22 bp, Artificial Sequence
  Synthetic oligonucleotide; CTT chr2 60453114 60453135 60453119 60453114 -
gatgacatttcatgttttcgtt

SEQ ID NO: 227396 - DNA, 22 bp, Artificial Sequence
  Synthetic oligonucleotide; TTG chr2 60453113 60453134 60453118 60453113 -
atgacatttcatgttttcgttg

SEQ ID NO: 227397 - DNA, 22 bp, Artificial Sequence
  Synthetic oligonucleotide; TTT chr2 60453104 60453125 60453109 60453104 -
catgttttcgttgtgctgcttt

SEQ ID NO: 227398 - DNA, 22 bp, Artificial Sequence
  Synthetic oligonucleotide; TTC chr2 60453103 60453124 60453108 60453103 -
atgttttcgttgtgctgctttt

SEQ ID NO: 227399 - DNA, 22 bp, Artificial Sequence
  Synthetic oligonucleotide; TTT chr2 60453097 60453118 60453102 60453097 -
tcgttgtgctgcttttacatca

SEQ ID NO: 227400 - DNA, 22 bp, Artificial Sequence
  Synthetic oligonucleotide; TTT chr2 60453096 60453117 60453101 60453096 -
cgttgtgctgcttttacatcag

SEQ ID NO: 227401 - DNA, 22 bp, Artificial Sequence
  Synthetic oligonucleotide; TTC chr2 60453095 60453116 60453100 60453095 -
gttgtgctgcttttacatcagt

SEQ ID NO: 227402 - DNA, 22 bp, Artificial Sequence
  Synthetic oligonucleotide; TTG chr2 60453091 60453112 60453096 60453091 -
tgctgcttttacatcagttttg

SEQ ID NO: 227403 - DNA, 22 bp, Artificial Sequence
  Synthetic oligonucleotide; CTG chr2 60453086 60453107 60453091 60453086 -
cttttacatcagttttgatttt

SEQ ID NO: 227404 - DNA, 22 bp, Artificial Sequence
  Synthetic oligonucleotide; CTT chr2 60453083 60453104 60453088 60453083 -
ttacatcagttttgattttttg

SEQ ID NO: 227405 - DNA, 22 bp, Artificial Sequence
  Synthetic oligonucleotide; TTT chr2 60453082 60453103 60453087 60453082 -
tacatcagttttgattttttgt

SEQ ID NO: 227406 - DNA, 22 bp, Artificial Sequence
  Synthetic oligonucleotide; TTT chr2 60453081 60453102 60453086 60453081 -
acatcagttttgattttttgtt

SEQ ID NO: 227407 - DNA, 22 bp, Artificial Sequence
  Synthetic oligonucleotide; TTA chr2 60453080 60453101 60453085 60453080 -
catcagttttgattttttgttt

SEQ ID NO: 227408 - DNA, 22 bp, Artificial Sequence
  Synthetic oligonucleotide; TTT chr2 60453071 60453092 60453076 60453071 -
tgattttttgtttctttataat

SEQ ID NO: 227409 - DNA, 22 bp, Artificial Sequence
  Synthetic oligonucleotide; TTT chr2 60453070 60453091 60453075 60453070 -
gattttttgtttctttataatt

SEQ ID NO: 227410 - DNA, 22 bp, Artificial Sequence
  Synthetic oligonucleotide; TTG chr2 60453069 60453090 60453074 60453069 -
attttttgtttctttataattt

SEQ ID NO: 227411 - DNA, 22 bp, Artificial Sequence
  Synthetic oligonucleotide; TTT chr2 60453065 60453086 60453070 60453065 -
tttgtttctttataattttatt

SEQ ID NO: 227412 - DNA, 22 bp, Artificial Sequence
  Synthetic oligonucleotide; TTT chr2 60453064 60453085 60453069 60453064 -
ttgtttctttataattttatta

SEQ ID NO: 227413 - DNA, 22 bp, Artificial Sequence
  Synthetic oligonucleotide; TTT chr2 60453063 60453084 60453068 60453063 -
tgtttctttataattttattat

SEQ ID NO: 227414 - DNA, 22 bp, Artificial Sequence
  Synthetic oligonucleotide; TTT chr2 60453062 60453083 60453067 60453062 -
gtttctttataattttattatt

SEQ ID NO: 227415 - DNA, 22 bp, Artificial Sequence
  Synthetic oligonucleotide; TTG chr2 60453061 60453082 60453066 60453061 -
tttctttataattttattatta

SEQ ID NO: 227416 - DNA, 22 bp, Artificial Sequence
  Synthetic oligonucleotide; TTT chr2 60453058 60453079 60453063 60453058 -
ctttataattttattattattt

SEQ ID NO: 227417 - DNA, 22 bp, Artificial Sequence
  Synthetic oligonucleotide; TTC chr2 60453057 60453078 60453062 60453057 -
tttataattttattattatttt

SEQ ID NO: 227418 - DNA, 22 bp, Artificial Sequence
  Synthetic oligonucleotide; CTT chr2 60453055 60453076 60453060 60453055 -
tataattttattattattttga

SEQ ID NO: 227419 - DNA, 22 bp, Artificial Sequence
  Synthetic oligonucleotide; TTT chr2 60453054 60453075 60453059 60453054 -
ataattttattattattttgag

SEQ ID NO: 227420 - DNA, 22 bp, Artificial Sequence
  Synthetic oligonucleotide; TTA chr2 60453053 60453074 60453058 60453053 -
taattttattattattttgaga

SEQ ID NO: 227421 - DNA, 22 bp, Artificial Sequence
  Synthetic oligonucleotide; TTT chr2 60453047 60453068 60453052 60453047 -
tattattattttgagaaggtgt

SEQ ID NO: 227422 - DNA, 22 bp, Artificial Sequence
  Synthetic oligonucleotide; TTT chr2 60453046 60453067 60453051 60453046 -
attattattttgagaaggtgtc

SEQ ID NO: 227423 - DNA, 22 bp, Artificial Sequence
  Synthetic oligonucleotide; TTA chr2 60453045 60453066 60453050 60453045 -
ttattattttgagaaggtgtcc

SEQ ID NO: 227424 - DNA, 22 bp, Artificial Sequence
  Synthetic oligonucleotide; TTA chr2 60453042 60453063 60453047 60453042 -
ttattttgagaaggtgtcccct

SEQ ID NO: 227425 - DNA, 22 bp, Artificial Sequence
  Synthetic oligonucleotide; TTA chr2 60453039 60453060 60453044 60453039 -
ttttgagaaggtgtcccctttc

SEQ ID NO: 227426 - DNA, 22 bp, Artificial Sequence
  Synthetic oligonucleotide; TTT chr2 60453036 60453057 60453041 60453036 -
tgagaaggtgtcccctttccct

SEQ ID NO: 227427 - DNA, 22 bp, Artificial Sequence
  Synthetic oligonucleotide; TTT chr2 60453035 60453056 60453040 60453035 -
gagaaggtgtcccctttccctc

SEQ ID NO: 227428 - DNA, 22 bp, Artificial Sequence
  Synthetic oligonucleotide; TTG chr2 60453034 60453055 60453039 60453034 -
agaaggtgtcccctttccctcc

SEQ ID NO: 227429 - DNA, 22 bp, Artificial Sequence
  Synthetic oligonucleotide; CTT chr2 60453019 60453040 60453024 60453019 -
tccctcctccctctcccgctct

SEQ ID NO: 227430 - DNA, 22 bp, Artificial Sequence
  Synthetic oligonucleotide; TTT chr2 60453018 60453039 60453023 60453018 -
ccctcctccctctcccgctctc

SEQ ID NO: 227431 - DNA, 22 bp, Artificial Sequence
  Synthetic oligonucleotide; TTC chr2 60453017 60453038 60453022 60453017 -
cctcctccctctcccgctctcc

SEQ ID NO: 227432 - DNA, 22 bp, Artificial Sequence
  Synthetic oligonucleotide; CTC chr2 60453013 60453034 60453018 60453013 -
ctccctctcccgctctcctcaa

SEQ ID NO: 227433 - DNA, 22 bp, Artificial Sequence
  Synthetic oligonucleotide; CTC chr2 60453010 60453031 60453015 60453010 -
cctctcccgctctcctcaacca

SEQ ID NO: 227434 - DNA, 22 bp, Artificial Sequence
  Synthetic oligonucleotide; CTC chr2 60453006 60453027 60453011 60453006 -
tcccgctctcctcaaccaaagg

SEQ ID NO: 227435 - DNA, 22 bp, Artificial Sequence
  Synthetic oligonucleotide; CTC chr2 60453004 60453025 60453009 60453004 -
ccgctctcctcaaccaaaggac

SEQ ID NO: 227436 - DNA, 22 bp, Artificial Sequence
  Synthetic oligonucleotide; CTC chr2 60452998 60453019 60453003 60452998 -
tcctcaaccaaaggactgtttc

SEQ ID NO: 227437 - DNA, 22 bp, Artificial Sequence
  Synthetic oligonucleotide; CTC chr2 60452996 60453017 60453001 60452996 -
ctcaaccaaaggactgtttctt

SEQ ID NO: 227438 - DNA, 22 bp, Artificial Sequence
  Synthetic oligonucleotide; CTC chr2 60452993 60453014 60452998 60452993 -
aaccaaaggactgtttcttact

SEQ ID NO: 227439 - DNA, 22 bp, Artificial Sequence
  Synthetic oligonucleotide; CTG chr2 60452980 60453001 60452985 60452980 -
tttcttactaagttttctcagt

SEQ ID NO: 227440 - DNA, 22 bp, Artificial Sequence
  Synthetic oligonucleotide; TTT chr2 60452977 60452998 60452982 60452977 -
cttactaagttttctcagtcat

SEQ ID NO: 227441 - DNA, 22 bp, Artificial Sequence
  Synthetic oligonucleotide; TTC chr2 60452976 60452997 60452981 60452976 -
ttactaagttttctcagtcata

SEQ ID NO: 227442 - DNA, 22 bp, Artificial Sequence
  Synthetic oligonucleotide; CTT chr2 60452974 60452995 60452979 60452974 -
actaagttttctcagtcataag

SEQ ID NO: 227443 - DNA, 22 bp, Artificial Sequence
  Synthetic oligonucleotide; TTA chr2 60452973 60452994 60452978 60452973 -
ctaagttttctcagtcataagg

SEQ ID NO: 227444 - DNA, 22 bp, Artificial Sequence
  Synthetic oligonucleotide; CTA chr2 60452970 60452991 60452975 60452970 -
agttttctcagtcataagggca

SEQ ID NO: 227445 - DNA, 22 bp, Artificial Sequence
  Synthetic oligonucleotide; TTT chr2 60452965 60452986 60452970 60452965 -
tctcagtcataagggcaagtgt

SEQ ID NO: 227446 - DNA, 22 bp, Artificial Sequence
  Synthetic oligonucleotide; TTT chr2 60452964 60452985 60452969 60452964 -
ctcagtcataagggcaagtgtt

SEQ ID NO: 227447 - DNA, 22 bp, Artificial Sequence
  Synthetic oligonucleotide; TTC chr2 60452963 60452984 60452968 60452963 -
tcagtcataagggcaagtgttt

SEQ ID NO: 227448 - DNA, 22 bp, Artificial Sequence
  Synthetic oligonucleotide; CTC chr2 60452961 60452982 60452966 60452961 -
agtcataagggcaagtgtttcc

SEQ ID NO: 227449 - DNA, 22 bp, Artificial Sequence
  Synthetic oligonucleotide; TTT chr2 60452941 60452962 60452946 60452941 -
ccttccaggtgtgtcccgagtt

SEQ ID NO: 227450 - DNA, 22 bp, Artificial Sequence
  Synthetic oligonucleotide; TTC chr2 60452940 60452961 60452945 60452940 -
cttccaggtgtgtcccgagttt

SEQ ID NO: 227451 - DNA, 22 bp, Artificial Sequence
  Synthetic oligonucleotide; CTT chr2 60452937 60452958 60452942 60452937 -
ccaggtgtgtcccgagtttatt

SEQ ID NO: 227452 - DNA, 22 bp, Artificial Sequence
  Synthetic oligonucleotide; TTC chr2 60452936 60452957 60452941 60452936 -
caggtgtgtcccgagtttatta

SEQ ID NO: 227453 - DNA, 22 bp, Artificial Sequence
  Synthetic oligonucleotide; TTT chr2 60452918 60452939 60452923 60452918 -
attaggactatcatacaattgg

SEQ ID NO: 227454 - DNA, 22 bp, Artificial Sequence
  Synthetic oligonucleotide; TTA chr2 60452917 60452938 60452922 60452917 -
ttaggactatcatacaattggg

SEQ ID NO: 227455 - DNA, 22 bp, Artificial Sequence
  Synthetic oligonucleotide; TTA chr2 60452914 60452935 60452919 60452914 -
ggactatcatacaattgggcag

SEQ ID NO: 227456 - DNA, 22 bp, Artificial Sequence
  Synthetic oligonucleotide; CTA chr2 60452908 60452929 60452913 60452908 -
tcatacaattgggcaggggtgg

SEQ ID NO: 227457 - DNA, 22 bp, Artificial Sequence
  Synthetic oligonucleotide; TTG chr2 60452897 60452918 60452902 60452897 -
ggcaggggtggggggacctggg

SEQ ID NO: 227458 - DNA, 22 bp, Artificial Sequence
  Synthetic oligonucleotide; CTG chr2 60452877 60452898 60452882 60452877 -
ggtcctccttggggggacggaa

SEQ ID NO: 227459 - DNA, 22 bp, Artificial Sequence
  Synthetic oligonucleotide; CTC chr2 60452870 60452891 60452875 60452870 -
cttggggggacggaagggaggg

SEQ ID NO: 227460 - DNA, 22 bp, Artificial Sequence
  Synthetic oligonucleotide; CTT chr2 60452867 60452888 60452872 60452867 -
ggggggacggaagggagggagg

SEQ ID NO: 227461 - DNA, 22 bp, Artificial Sequence
  Synthetic oligonucleotide; TTG chr2 60452866 60452887 60452871 60452866 -
gggggacggaagggagggaggc

SEQ ID NO: 227462 - DNA, 22 bp, Artificial Sequence
  Synthetic oligonucleotide; CTC chr2 60452829 60452850 60452834 60452829 -
agaggtcagagatacttgggga

SEQ ID NO: 227463 - DNA, 22 bp, Artificial Sequence
  Synthetic oligonucleotide; CTT chr2 60452812 60452833 60452817 60452812 -
ggggaggggaggctgagtttga

SEQ ID NO: 227464 - DNA, 22 bp, Artificial Sequence
  Synthetic oligonucleotide; TTG chr2 60452811 60452832 60452816 60452811 -
gggaggggaggctgagtttgaa

SEQ ID NO: 227465 - DNA, 22 bp, Artificial Sequence
  Synthetic oligonucleotide; CTG chr2 60452797 60452818 60452802 60452797 -
agtttgaaatcatgcttaagat

SEQ ID NO: 227466 - DNA, 22 bp, Artificial Sequence
  Synthetic oligonucleotide; TTT chr2 60452792 60452813 60452797 60452792 -
gaaatcatgcttaagatgccag

SEQ ID NO: 227467 - DNA, 22 bp, Artificial Sequence
  Synthetic oligonucleotide; TTG chr2 60452791 60452812 60452796 60452791 -
aaatcatgcttaagatgccagt

SEQ ID NO: 227468 - DNA, 22 bp, Artificial Sequence
  Synthetic oligonucleotide; CTT chr2 60452780 60452801 60452785 60452780 -
aagatgccagtggctcgacctg

SEQ ID NO: 227469 - DNA, 22 bp, Artificial Sequence
  Synthetic oligonucleotide; TTA chr2 60452779 60452800 60452784 60452779 -
agatgccagtggctcgacctgt

SEQ ID NO: 227470 - DNA, 22 bp, Artificial Sequence
  Synthetic oligonucleotide; CTC chr2 60452764 60452785 60452769 60452764 -
gacctgtggttggtttaagttc

SEQ ID NO: 227471 - DNA, 22 bp, Artificial Sequence
  Synthetic oligonucleotide; CTG chr2 60452758 60452779 60452763 60452758 -
tggttggtttaagttctaattt

SEQ ID NO: 227472 - DNA, 22 bp, Artificial Sequence
  Synthetic oligonucleotide; TTG chr2 60452752 60452773 60452757 60452752 -
gtttaagttctaatttttaaaa

SEQ ID NO: 227473 - DNA, 22 bp, Artificial Sequence
  Synthetic oligonucleotide; TTT chr2 60452748 60452769 60452753 60452748 -
aagttctaatttttaaaaagct

SEQ ID NO: 227474 - DNA, 22 bp, Artificial Sequence
  Synthetic oligonucleotide; TTA chr2 60452747 60452768 60452752 60452747 -
agttctaatttttaaaaagcta

SEQ ID NO: 227475 - DNA, 22 bp, Artificial Sequence
  Synthetic oligonucleotide; TTC chr2 60452742 60452763 60452747 60452742 -
taatttttaaaaagctagttag

SEQ ID NO: 227476 - DNA, 22 bp, Artificial Sequence
  Synthetic oligonucleotide; CTA chr2 60452740 60452761 60452745 60452740 -
atttttaaaaagctagttagag

SEQ ID NO: 227477 - DNA, 22 bp, Artificial Sequence
  Synthetic oligonucleotide; TTT chr2 60452736 60452757 60452741 60452736 -
ttaaaaagctagttagagaaca

SEQ ID NO: 227478 - DNA, 22 bp, Artificial Sequence
  Synthetic oligonucleotide; TTT chr2 60452735 60452756 60452740 60452735 -
taaaaagctagttagagaacag

SEQ ID NO: 227479 - DNA, 22 bp, Artificial Sequence
  Synthetic oligonucleotide; TTT chr2 60452734 60452755 60452739 60452734 -
aaaaagctagttagagaacaga

SEQ ID NO: 227480 - DNA, 22 bp, Artificial Sequence
  Synthetic oligonucleotide; TTA chr2 60452733 60452754 60452738 60452733 -
aaaagctagttagagaacagaa

SEQ ID NO: 227481 - DNA, 22 bp, Artificial Sequence
  Synthetic oligonucleotide; CTA chr2 60452725 60452746 60452730 60452725 -
gttagagaacagaaaatcattg

SEQ ID NO: 227482 - DNA, 22 bp, Artificial Sequence
  Synthetic oligonucleotide; TTA chr2 60452721 60452742 60452726 60452721 -
gagaacagaaaatcattgggcc

SEQ ID NO: 227483 - DNA, 22 bp, Artificial Sequence
  Synthetic oligonucleotide; TTG chr2 60452703 60452724 60452708 60452703 -
ggccaagtcacacctgtacttt

SEQ ID NO: 227484 - DNA, 22 bp, Artificial Sequence
  Synthetic oligonucleotide; CTG chr2 60452687 60452708 60452692 60452687 -
tactttttttttccccctcctc

SEQ ID NO: 227485 - DNA, 22 bp, Artificial Sequence
  Synthetic oligonucleotide; CTT chr2 60452682 60452703 60452687 60452682 -
tttttttccccctcctctgtct

SEQ ID NO: 227486 - DNA, 22 bp, Artificial Sequence
  Synthetic oligonucleotide; TTT chr2 60452681 60452702 60452686 60452681 -
ttttttccccctcctctgtctc

SEQ ID NO: 227487 - DNA, 22 bp, Artificial Sequence
  Synthetic oligonucleotide; TTT chr2 60452680 60452701 60452685 60452680 -
tttttccccctcctctgtctcc

SEQ ID NO: 227488 - DNA, 22 bp, Artificial Sequence
  Synthetic oligonucleotide; TTT chr2 60452679 60452700 60452684 60452679 -
ttttccccctcctctgtctcca

SEQ ID NO: 227489 - DNA, 22 bp, Artificial Sequence
  Synthetic oligonucleotide; TTT chr2 60452678 60452699 60452683 60452678 -
tttccccctcctctgtctccaa

SEQ ID NO: 227490 - DNA, 22 bp, Artificial Sequence
  Synthetic oligonucleotide; TTT chr2 60452677 60452698 60452682 60452677 -
ttccccctcctctgtctccaac

SEQ ID NO: 227491 - DNA, 22 bp, Artificial Sequence
  Synthetic oligonucleotide; TTT chr2 60452676 60452697 60452681 60452676 -
tccccctcctctgtctccaacc

SEQ ID NO: 227492 - DNA, 22 bp, Artificial Sequence
  Synthetic oligonucleotide; TTT chr2 60452675 60452696 60452680 60452675 -
ccccctcctctgtctccaacct

SEQ ID NO: 227493 - DNA, 22 bp, Artificial Sequence
  Synthetic oligonucleotide; TTC chr2 60452674 60452695 60452679 60452674 -
cccctcctctgtctccaacctc

SEQ ID NO: 227494 - DNA, 22 bp, Artificial Sequence
  Synthetic oligonucleotide; CTC chr2 60452668 60452689 60452673 60452668 -
ctctgtctccaacctctttcta

SEQ ID NO: 227495 - DNA, 22 bp, Artificial Sequence
  Synthetic oligonucleotide; CTC chr2 60452665 60452686 60452670 60452665 -
tgtctccaacctctttctaggt

SEQ ID NO: 227496 - DNA, 22 bp, Artificial Sequence
  Synthetic oligonucleotide; CTG chr2 60452663 60452684 60452668 60452663 -
tctccaacctctttctaggttc

SEQ ID NO: 227497 - DNA, 22 bp, Artificial Sequence
  Synthetic oligonucleotide; CTC chr2 60452659 60452680 60452664 60452659 -
caacctctttctaggttcttca

SEQ ID NO: 227498 - DNA, 22 bp, Artificial Sequence
  Synthetic oligonucleotide; CTC chr2 60452652 60452673 60452657 60452652 -
tttctaggttcttcacacaccc

SEQ ID NO: 227499 - DNA, 22 bp, Artificial Sequence
  Synthetic oligonucleotide; CTT chr2 60452650 60452671 60452655 60452650 -
tctaggttcttcacacaccccc

SEQ ID NO: 227500 - DNA, 22 bp, Artificial Sequence
  Synthetic oligonucleotide; TTT chr2 60452649 60452670 60452654 60452649 -
ctaggttcttcacacaccccca

SEQ ID NO: 227501 - DNA, 22 bp, Artificial Sequence
  Synthetic oligonucleotide; TTC chr2 60452648 60452669 60452653 60452648 -
taggttcttcacacacccccat

SEQ ID NO: 227502 - DNA, 22 bp, Artificial Sequence
  Synthetic oligonucleotide; CTA chr2 60452646 60452667 60452651 60452646 -
ggttcttcacacacccccattc

SEQ ID NO: 227503 - DNA, 22 bp, Artificial Sequence
  Synthetic oligonucleotide; TTC chr2 60452641 60452662 60452646 60452641 -
ttcacacacccccattcggcgt

SEQ ID NO: 227504 - DNA, 22 bp, Artificial Sequence
  Synthetic oligonucleotide; CTT chr2 60452639 60452660 60452644 60452639 -
cacacacccccattcggcgtag

SEQ ID NO: 227505 - DNA, 22 bp, Artificial Sequence
  Synthetic oligonucleotide; TTC chr2 60452638 60452659 60452643 60452638 -
acacacccccattcggcgtagt

SEQ ID NO: 227506 - DNA, 22 bp, Artificial Sequence
  Synthetic oligonucleotide; TTC chr2 60452624 60452645 60452629 60452624 -
ggcgtagtacccagagagctca

SEQ ID NO: 227507 - DNA, 22 bp, Artificial Sequence
  Synthetic oligonucleotide; CTC chr2 60452603 60452624 60452608 60452603 -
aagatgtgtggcagttttcgga

SEQ ID NO: 227508 - DNA, 22 bp, Artificial Sequence
  Synthetic oligonucleotide; TTT chr2 60452586 60452607 60452591 60452586 -
tcggatggaagctcgagagccc

SEQ ID NO: 227509 - DNA, 22 bp, Artificial Sequence
  Synthetic oligonucleotide; TTT chr2 60452585 60452606 60452590 60452585 -
cggatggaagctcgagagccct

SEQ ID NO: 227510 - DNA, 22 bp, Artificial Sequence
  Synthetic oligonucleotide; TTC chr2 60452584 60452605 60452589 60452584 -
ggatggaagctcgagagccctt

SEQ ID NO: 227511 - DNA, 22 bp, Artificial Sequence
  Synthetic oligonucleotide; CTC chr2 60452572 60452593 60452577 60452572 -
gagagcccttaagttctgagaa

SEQ ID NO: 227512 - DNA, 22 bp, Artificial Sequence
  Synthetic oligonucleotide; CTT chr2 60452562 60452583 60452567 60452562 -
aagttctgagaaaatttgaagc

SEQ ID NO: 227513 - DNA, 22 bp, Artificial Sequence
  Synthetic oligonucleotide; TTA chr2 60452561 60452582 60452566 60452561 -
agttctgagaaaatttgaagcc

SEQ ID NO: 227514 - DNA, 22 bp, Artificial Sequence
  Synthetic oligonucleotide; TTC chr2 60452556 60452577 60452561 60452556 -
tgagaaaatttgaagcccccag

SEQ ID NO: 227515 - DNA, 22 bp, Artificial Sequence
  Synthetic oligonucleotide; CTG chr2 60452554 60452575 60452559 60452554 -
agaaaatttgaagcccccaggg

SEQ ID NO: 227516 - DNA, 22 bp, Artificial Sequence
  Synthetic oligonucleotide; TTT chr2 60452545 60452566 60452550 60452545 -
gaagcccccaggggtggggtgg

SEQ ID NO: 227517 - DNA, 22 bp, Artificial Sequence
  Synthetic oligonucleotide; TTG chr2 60452544 60452565 60452549 60452544 -
aagcccccaggggtggggtgga

SEQ ID NO: 227518 - DNA, 22 bp, Artificial Sequence
  Synthetic oligonucleotide; CTG chr2 60452489 60452510 60452494 60452489 -
tcatcctgctagtttgtgatgt

SEQ ID NO: 227519 - DNA, 22 bp, Artificial Sequence
  Synthetic oligonucleotide; CTG chr2 60452481 60452502 60452486 60452481 -
ctagtttgtgatgttttctgac

SEQ ID NO: 227520 - DNA, 22 bp, Artificial Sequence
  Synthetic oligonucleotide; CTA chr2 60452478 60452499 60452483 60452478 -
gtttgtgatgttttctgacagt

SEQ ID NO: 227521 - DNA, 22 bp, Artificial Sequence
  Synthetic oligonucleotide; TTT chr2 60452474 60452495 60452479 60452474 -
gtgatgttttctgacagtagcc

SEQ ID NO: 227522 - DNA, 22 bp, Artificial Sequence
  Synthetic oligonucleotide; TTG chr2 60452473 60452494 60452478 60452473 -
tgatgttttctgacagtagcct

SEQ ID NO: 227523 - DNA, 22 bp, Artificial Sequence
  Synthetic oligonucleotide; TTT chr2 60452465 60452486 60452470 60452465 -
tctgacagtagcctccaagaag

SEQ ID NO: 227524 - DNA, 22 bp, Artificial Sequence
  Synthetic oligonucleotide; TTT chr2 60452464 60452485 60452469 60452464 -
ctgacagtagcctccaagaagc

SEQ ID NO: 227525 - DNA, 22 bp, Artificial Sequence
  Synthetic oligonucleotide; TTC chr2 60452463 60452484 60452468 60452463 -
tgacagtagcctccaagaagcc

SEQ ID NO: 227526 - DNA, 22 bp, Artificial Sequence
  Synthetic oligonucleotide; CTG chr2 60452461 60452482 60452466 60452461 -
acagtagcctccaagaagccgt

SEQ ID NO: 227527 - DNA, 22 bp, Artificial Sequence
  Synthetic oligonucleotide; CTC chr2 60452450 60452471 60452455 60452450 -
caagaagccgttgtgcgaagac

SEQ ID NO: 227528 - DNA, 22 bp, Artificial Sequence
  Synthetic oligonucleotide; TTG chr2 60452437 60452458 60452442 60452437 -
tgcgaagacagagtcctgcaga

SEQ ID NO: 227529 - DNA, 22 bp, Artificial Sequence
  Synthetic oligonucleotide; CTG chr2 60452419 60452440 60452424 60452419 -
cagagtccttccagcctaggcc

SEQ ID NO: 227530 - DNA, 22 bp, Artificial Sequence
  Synthetic oligonucleotide; CTT chr2 60452409 60452430 60452414 60452409 -
ccagcctaggcctgcagcgcca

SEQ ID NO: 227531 - DNA, 22 bp, Artificial Sequence
  Synthetic oligonucleotide; TTC chr2 60452408 60452429 60452413 60452408 -
cagcctaggcctgcagcgccat

SEQ ID NO: 227532 - DNA, 22 bp, Artificial Sequence
  Synthetic oligonucleotide; CTA chr2 60452401 60452422 60452406 60452401 -
ggcctgcagcgccattttattt

SEQ ID NO: 227533 - DNA, 22 bp, Artificial Sequence
  Synthetic oligonucleotide; CTG chr2 60452395 60452416 60452400 60452395 -
cagcgccattttatttatattt

SEQ ID NO: 227534 - DNA, 22 bp, Artificial Sequence
  Synthetic oligonucleotide; TTT chr2 60452384 60452405 60452389 60452384 -
tatttatattttttaataaaaa

SEQ ID NO: 227535 - DNA, 22 bp, Artificial Sequence
  Synthetic oligonucleotide; TTT chr2 60452383 60452404 60452388 60452383 -
atttatattttttaataaaaag

SEQ ID NO: 227536 - DNA, 22 bp, Artificial Sequence
  Synthetic oligonucleotide; TTA chr2 60452382 60452403 60452387 60452382 -
tttatattttttaataaaaagt

SEQ ID NO: 227537 - DNA, 22 bp, Artificial Sequence
  Synthetic oligonucleotide; TTT chr2 60452379 60452400 60452384 60452379 -
atattttttaataaaaagtaaa

SEQ ID NO: 227538 - DNA, 22 bp, Artificial Sequence
  Synthetic oligonucleotide; TTA chr2 60452378 60452399 60452383 60452378 -
tattttttaataaaaagtaaaa

SEQ ID NO: 227539 - DNA, 22 bp, Artificial Sequence
  Synthetic oligonucleotide; TTT chr2 60452373 60452394 60452378 60452373 -
tttaataaaaagtaaaaacaaa

SEQ ID NO: 227540 - DNA, 22 bp, Artificial Sequence
  Synthetic oligonucleotide; TTT chr2 60452372 60452393 60452377 60452372 -
ttaataaaaagtaaaaacaaaa

SEQ ID NO: 227541 - DNA, 22 bp, Artificial Sequence
  Synthetic oligonucleotide; TTT chr2 60452371 60452392 60452376 60452371 -
taataaaaagtaaaaacaaaaa

SEQ ID NO: 227542 - DNA, 22 bp, Artificial Sequence
  Synthetic oligonucleotide; TTT chr2 60452370 60452391 60452375 60452370 -
aataaaaagtaaaaacaaaaaa

SEQ ID NO: 227543 - DNA, 22 bp, Artificial Sequence
  Synthetic oligonucleotide; TTA chr2 60452369 60452390 60452374 60452369 -
ataaaaagtaaaaacaaaaaaa

SEQ ID NO: 227544 - DNA, 22 bp, Artificial Sequence
  Synthetic oligonucleotide; TTG chr2 60452334 60452355 60452339 60452334 -
gaacagtgaatcagtcccatag

SEQ ID NO: 227545 - DNA, 22 bp, Artificial Sequence
  Synthetic oligonucleotide; CTG chr2 60452289 60452310 60452294 60452289 -
tcatgagtgatgccctggccct

SEQ ID NO: 227546 - DNA, 22 bp, Artificial Sequence
  Synthetic oligonucleotide; CTG chr2 60452272 60452293 60452277 60452272 -
gcccttctgaaaccagccaacc

SEQ ID NO: 227547 - DNA, 22 bp, Artificial Sequence
  Synthetic oligonucleotide; CTT chr2 60452266 60452287 60452271 60452266 -
ctgaaaccagccaacctaatta

SEQ ID NO: 227548 - DNA, 22 bp, Artificial Sequence
  Synthetic oligonucleotide; TTC chr2 60452265 60452286 60452270 60452265 -
tgaaaccagccaacctaattac

SEQ ID NO: 227549 - DNA, 22 bp, Artificial Sequence
  Synthetic oligonucleotide; CTG chr2 60452263 60452284 60452268 60452263 -
aaaccagccaacctaattacct

SEQ ID NO: 227550 - DNA, 22 bp, Artificial Sequence
  Synthetic oligonucleotide; CTA chr2 60452248 60452269 60452253 60452248 -
attacctgtattgtggaaatgc

SEQ ID NO: 227551 - DNA, 22 bp, Artificial Sequence
  Synthetic oligonucleotide; TTA chr2 60452244 60452265 60452249 60452244 -
cctgtattgtggaaatgcgcat

SEQ ID NO: 227552 - DNA, 22 bp, Artificial Sequence
  Synthetic oligonucleotide; CTG chr2 60452240 60452261 60452245 60452240 -
tattgtggaaatgcgcatgagt

SEQ ID NO: 227553 - DNA, 22 bp, Artificial Sequence
  Synthetic oligonucleotide; TTG chr2 60452235 60452256 60452240 60452235 -
tggaaatgcgcatgagtcccca

SEQ ID NO: 227554 - DNA, 22 bp, Artificial Sequence
  Synthetic oligonucleotide; CTT chr2 60452206 60452227 60452211 60452206 -
gtttctatacattctatgttgt

SEQ ID NO: 227555 - DNA, 22 bp, Artificial Sequence
  Synthetic oligonucleotide; TTG chr2 60452205 60452226 60452210 60452205 -
tttctatacattctatgttgtc

SEQ ID NO: 227556 - DNA, 22 bp, Artificial Sequence
  Synthetic oligonucleotide; TTT chr2 60452202 60452223 60452207 60452202 -
ctatacattctatgttgtcttt

SEQ ID NO: 227557 - DNA, 22 bp, Artificial Sequence
  Synthetic oligonucleotide; TTC chr2 60452201 60452222 60452206 60452201 -
tatacattctatgttgtctttt

SEQ ID NO: 227558 - DNA, 22 bp, Artificial Sequence
  Synthetic oligonucleotide; CTA chr2 60452199 60452220 60452204 60452199 -
tacattctatgttgtcttttaa

SEQ ID NO: 227559 - DNA, 22 bp, Artificial Sequence
  Synthetic oligonucleotide; TTC chr2 60452192 60452213 60452197 60452192 -
tatgttgtcttttaaaaagtgt

SEQ ID NO: 227560 - DNA, 22 bp, Artificial Sequence
  Synthetic oligonucleotide; CTA chr2 60452190 60452211 60452195 60452190 -
tgttgtcttttaaaaagtgtgc

SEQ ID NO: 227561 - DNA, 22 bp, Artificial Sequence
  Synthetic oligonucleotide; TTG chr2 60452185 60452206 60452190 60452185 -
tcttttaaaaagtgtgcttaac

SEQ ID NO: 227562 - DNA, 22 bp, Artificial Sequence
  Synthetic oligonucleotide; CTT chr2 60452181 60452202 60452186 60452181 -
ttaaaaagtgtgcttaacattg

SEQ ID NO: 227563 - DNA, 22 bp, Artificial Sequence
  Synthetic oligonucleotide; TTT chr2 60452180 60452201 60452185 60452180 -
taaaaagtgtgcttaacattga

SEQ ID NO: 227564 - DNA, 22 bp, Artificial Sequence
  Synthetic oligonucleotide; TTT chr2 60452179 60452200 60452184 60452179 -
aaaaagtgtgcttaacattgac

SEQ ID NO: 227565 - DNA, 22 bp, Artificial Sequence
  Synthetic oligonucleotide; TTA chr2 60452178 60452199 60452183 60452178 -
aaaagtgtgcttaacattgaca

SEQ ID NO: 227566 - DNA, 22 bp, Artificial Sequence
  Synthetic oligonucleotide; CTT chr2 60452166 60452187 60452171 60452166 -
aacattgacacaataaatgttg

SEQ ID NO: 227567 - DNA, 22 bp, Artificial Sequence
  Synthetic oligonucleotide; TTA chr2 60452165 60452186 60452170 60452165 -
acattgacacaataaatgttgg

SEQ ID NO: 227568 - DNA, 22 bp, Artificial Sequence
  Synthetic oligonucleotide; TTG chr2 60452159 60452180 60452164 60452159 -
acacaataaatgttggagcttt

SEQ ID NO: 227569 - DNA, 22 bp, Artificial Sequence
  Synthetic oligonucleotide; TTG chr2 60452144 60452165 60452149 60452144 -
gagctttaggtggtgtttgctt

SEQ ID NO: 227570 - DNA, 22 bp, Artificial Sequence
  Synthetic oligonucleotide; CTT chr2 60452138 60452159 60452143 60452138 -
taggtggtgtttgcttgttctt

SEQ ID NO: 227571 - DNA, 22 bp, Artificial Sequence
  Synthetic oligonucleotide; TTT chr2 60452137 60452158 60452142 60452137 -
aggtggtgtttgcttgttcttt

SEQ ID NO: 227572 - DNA, 22 bp, Artificial Sequence
  Synthetic oligonucleotide; TTA chr2 60452136 60452157 60452141 60452136 -
ggtggtgtttgcttgttcttta

SEQ ID NO: 227573 - DNA, 22 bp, Artificial Sequence
  Synthetic oligonucleotide; TTT chr2 60452126 60452147 60452131 60452126 -
gcttgttctttaatttttaatg

SEQ ID NO: 227574 - DNA, 22 bp, Artificial Sequence
  Synthetic oligonucleotide; TTG chr2 60452125 60452146 60452130 60452125 -
cttgttctttaatttttaatgc

SEQ ID NO: 227575 - DNA, 22 bp, Artificial Sequence
  Synthetic oligonucleotide; CTT chr2 60452122 60452143 60452127 60452122 -
gttctttaatttttaatgctta

SEQ ID NO: 227576 - DNA, 22 bp, Artificial Sequence
  Synthetic oligonucleotide; TTG chr2 60452121 60452142 60452126 60452121 -
ttctttaatttttaatgcttat

SEQ ID NO: 227577 - DNA, 22 bp, Artificial Sequence
  Synthetic oligonucleotide; TTC chr2 60452118 60452139 60452123 60452118 -
tttaatttttaatgcttataag

SEQ ID NO: 227578 - DNA, 22 bp, Artificial Sequence
  Synthetic oligonucleotide; CTT chr2 60452116 60452137 60452121 60452116 -
taatttttaatgcttataagac

SEQ ID NO: 227579 - DNA, 22 bp, Artificial Sequence
  Synthetic oligonucleotide; TTT chr2 60452115 60452136 60452120 60452115 -
aatttttaatgcttataagaca

SEQ ID NO: 227580 - DNA, 22 bp, Artificial Sequence
  Synthetic oligonucleotide; TTA chr2 60452114 60452135 60452119 60452114 -
atttttaatgcttataagacaa

SEQ ID NO: 227581 - DNA, 22 bp, Artificial Sequence
  Synthetic oligonucleotide; TTT chr2 60452110 60452131 60452115 60452110 -
ttaatgcttataagacaatgag

SEQ ID NO: 227582 - DNA, 22 bp, Artificial Sequence
  Synthetic oligonucleotide; TTT chr2 60452109 60452130 60452114 60452109 -
taatgcttataagacaatgagg

SEQ ID NO: 227583 - DNA, 22 bp, Artificial Sequence
  Synthetic oligonucleotide; TTT chr2 60452108 60452129 60452113 60452108 -
aatgcttataagacaatgaggc

SEQ ID NO: 227584 - DNA, 22 bp, Artificial Sequence
  Synthetic oligonucleotide; TTA chr2 60452107 60452128 60452112 60452107 -
atgcttataagacaatgaggct

SEQ ID NO: 227585 - DNA, 22 bp, Artificial Sequence
  Synthetic oligonucleotide; CTT chr2 60452101 60452122 60452106 60452101 -
ataagacaatgaggctgcttat

SEQ ID NO: 227586 - DNA, 22 bp, Artificial Sequence
  Synthetic oligonucleotide; TTA chr2 60452100 60452121 60452105 60452100 -
taagacaatgaggctgcttatg

SEQ ID NO: 227587 - DNA, 22 bp, Artificial Sequence
  Synthetic oligonucleotide; CTG chr2 60452084 60452105 60452089 60452084 -
cttatgattttgtacttctgta

SEQ ID NO: 227588 - DNA, 22 bp, Artificial Sequence
  Synthetic oligonucleotide; CTT chr2 60452081 60452102 60452086 60452081 -
atgattttgtacttctgtacct

SEQ ID NO: 227589 - DNA, 22 bp, Artificial Sequence
  Synthetic oligonucleotide; TTA chr2 60452080 60452101 60452085 60452080 -
tgattttgtacttctgtacctg

SEQ ID NO: 227590 - DNA, 22 bp, Artificial Sequence
  Synthetic oligonucleotide; TTT chr2 60452074 60452095 60452079 60452074 -
tgtacttctgtacctgtttcct

SEQ ID NO: 227591 - DNA, 22 bp, Artificial Sequence
  Synthetic oligonucleotide; TTT chr2 60452073 60452094 60452078 60452073 -
gtacttctgtacctgtttccta

SEQ ID NO: 227592 - DNA, 22 bp, Artificial Sequence
  Synthetic oligonucleotide; TTG chr2 60452072 60452093 60452077 60452072 -
tacttctgtacctgtttcctac

SEQ ID NO: 227593 - DNA, 22 bp, Artificial Sequence
  Synthetic oligonucleotide; CTT chr2 60452067 60452088 60452072 60452067 -
ctgtacctgtttcctacagaca

SEQ ID NO: 227594 - DNA, 22 bp, Artificial Sequence
  Synthetic oligonucleotide; TTC chr2 60452066 60452087 60452071 60452066 -
tgtacctgtttcctacagacac

SEQ ID NO: 227595 - DNA, 22 bp, Artificial Sequence
  Synthetic oligonucleotide; CTG chr2 60452064 60452085 60452069 60452064 -
tacctgtttcctacagacaccc

SEQ ID NO: 227596 - DNA, 22 bp, Artificial Sequence
  Synthetic oligonucleotide; CTG chr2 60452058 60452079 60452063 60452058 -
tttcctacagacacccatcggg

SEQ ID NO: 227597 - DNA, 22 bp, Artificial Sequence
  Synthetic oligonucleotide; TTT chr2 60452055 60452076 60452060 60452055 -
cctacagacacccatcgggtgg

SEQ ID NO: 227598 - DNA, 22 bp, Artificial Sequence
  Synthetic oligonucleotide; TTC chr2 60452054 60452075 60452059 60452054 -
ctacagacacccatcgggtggg

SEQ ID NO: 227599 - DNA, 22 bp, Artificial Sequence
  Synthetic oligonucleotide; CTA chr2 60452051 60452072 60452056 60452051 -
cagacacccatcgggtgggtag

SEQ ID NO: 227600 - DNA, 22 bp, Artificial Sequence
  Synthetic oligonucleotide; TTT chr2 60452016 60452037 60452021 60452016 -
gagaaatgggcaggagatgtag

SEQ ID NO: 227601 - DNA, 22 bp, Artificial Sequence
  Synthetic oligonucleotide; TTG chr2 60452015 60452036 60452020 60452015 -
agaaatgggcaggagatgtagg

SEQ ID NO: 227602 - DNA, 22 bp, Artificial Sequence
  Synthetic oligonucleotide; CTA chr2 60451983 60452004 60451988 60451983 -
ggttaccgcttatcagatggca

SEQ ID NO: 227603 - DNA, 22 bp, Artificial Sequence
  Synthetic oligonucleotide; TTA chr2 60451978 60451999 60451983 60451978 -
ccgcttatcagatggcataaat

SEQ ID NO: 227604 - DNA, 22 bp, Artificial Sequence
  Synthetic oligonucleotide; CTT chr2 60451972 60451993 60451977 60451972 -
atcagatggcataaattttcaa

SEQ ID NO: 227605 - DNA, 22 bp, Artificial Sequence
  Synthetic oligonucleotide; TTA chr2 60451971 60451992 60451976 60451971 -
tcagatggcataaattttcaag

SEQ ID NO: 227606 - DNA, 22 bp, Artificial Sequence
  Synthetic oligonucleotide; TTT chr2 60451954 60451975 60451959 60451954 -
tcaaggagaatcaaaatgcaaa

SEQ ID NO: 227607 - DNA, 22 bp, Artificial Sequence
  Synthetic oligonucleotide; TTT chr2 60451953 60451974 60451958 60451953 -
caaggagaatcaaaatgcaaaa

SEQ ID NO: 227608 - DNA, 22 bp, Artificial Sequence
  Synthetic oligonucleotide; TTC chr2 60451952 60451973 60451957 60451952 -
aaggagaatcaaaatgcaaaac

SEQ ID NO: 227609 - DNA, 22 bp, Artificial Sequence
  Synthetic oligonucleotide; CTT chr2 60451928 60451949 60451933 60451928 -
gggaataaatcatagcaatatc

SEQ ID NO: 227610 - DNA, 22 bp, Artificial Sequence
  Synthetic oligonucleotide; TTG chr2 60451927 60451948 60451932 60451927 -
ggaataaatcatagcaatatca

SEQ ID NO: 227611 - DNA, 22 bp, Artificial Sequence
  Synthetic oligonucleotide; TTA chr2 60451899 60451920 60451904 60451899 -
atgtagtagtaatattgctgtt

SEQ ID NO: 227612 - DNA, 22 bp, Artificial Sequence
  Synthetic oligonucleotide; TTG chr2 60451882 60451903 60451887 60451882 -
ctgtttattaatgctgaagtgt

SEQ ID NO: 227613 - DNA, 22 bp, Artificial Sequence
  Synthetic oligonucleotide; CTG chr2 60451879 60451900 60451884 60451879 -
tttattaatgctgaagtgtggt

SEQ ID NO: 227614 - DNA, 22 bp, Artificial Sequence
  Synthetic oligonucleotide; TTT chr2 60451876 60451897 60451881 60451876 -
attaatgctgaagtgtggtttt

SEQ ID NO: 227615 - DNA, 22 bp, Artificial Sequence
  Synthetic oligonucleotide; TTA chr2 60451875 60451896 60451880 60451875 -
ttaatgctgaagtgtggttttc

SEQ ID NO: 227616 - DNA, 22 bp, Artificial Sequence
  Synthetic oligonucleotide; TTA chr2 60451872 60451893 60451877 60451872 -
atgctgaagtgtggttttccta

SEQ ID NO: 227617 - DNA, 22 bp, Artificial Sequence
  Synthetic oligonucleotide; CTG chr2 60451866 60451887 60451871 60451866 -
aagtgtggttttcctaactgtc

SEQ ID NO: 227618 - DNA, 22 bp, Artificial Sequence
  Synthetic oligonucleotide; TTT chr2 60451855 60451876 60451860 60451855 -
tcctaactgtctgacttataat

SEQ ID NO: 227619 - DNA, 22 bp, Artificial Sequence
  Synthetic oligonucleotide; TTT chr2 60451854 60451875 60451859 60451854 -
cctaactgtctgacttataatt

SEQ ID NO: 227620 - DNA, 22 bp, Artificial Sequence
  Synthetic oligonucleotide; TTC chr2 60451853 60451874 60451858 60451853 -
ctaactgtctgacttataattt

SEQ ID NO: 227621 - DNA, 22 bp, Artificial Sequence
  Synthetic oligonucleotide; CTA chr2 60451850 60451871 60451855 60451850 -
actgtctgacttataatttgca

SEQ ID NO: 227622 - DNA, 22 bp, Artificial Sequence
  Synthetic oligonucleotide; CTG chr2 60451846 60451867 60451851 60451846 -
tctgacttataatttgcatacc

SEQ ID NO: 227623 - DNA, 22 bp, Artificial Sequence
  Synthetic oligonucleotide; CTG chr2 60451842 60451863 60451847 60451842 -
acttataatttgcataccatta

SEQ ID NO: 227624 - DNA, 22 bp, Artificial Sequence
  Synthetic oligonucleotide; CTT chr2 60451838 60451859 60451843 60451838 -
ataatttgcataccattaaata

SEQ ID NO: 227625 - DNA, 22 bp, Artificial Sequence
  Synthetic oligonucleotide; TTA chr2 60451837 60451858 60451842 60451837 -
taatttgcataccattaaataa

SEQ ID NO: 227626 - DNA, 22 bp, Artificial Sequence
  Synthetic oligonucleotide; TTT chr2 60451831 60451852 60451836 60451831 -
gcataccattaaataatgcata

SEQ ID NO: 227627 - DNA, 22 bp, Artificial Sequence
  Synthetic oligonucleotide; TTG chr2 60451830 60451851 60451835 60451830 -
cataccattaaataatgcataa

SEQ ID NO: 227628 - DNA, 22 bp, Artificial Sequence
  Synthetic oligonucleotide; TTA chr2 60451820 60451841 60451825 60451820 -
aataatgcataatatggcacgc

SEQ ID NO: 227629 - DNA, 22 bp, Artificial Sequence
  Synthetic oligonucleotide; CTG chr2 60451789 60451810 60451794 60451789 -
tttttcaaatatatgcttttgg

SEQ ID NO: 227630 - DNA, 22 bp, Artificial Sequence
  Synthetic oligonucleotide; TTT chr2 60451786 60451807 60451791 60451786 -
ttcaaatatatgcttttggtgg

SEQ ID NO: 227631 - DNA, 22 bp, Artificial Sequence
  Synthetic oligonucleotide; TTT chr2 60451785 60451806 60451790 60451785 -
tcaaatatatgcttttggtggc

SEQ ID NO: 227632 - DNA, 22 bp, Artificial Sequence
  Synthetic oligonucleotide; TTT chr2 60451784 60451805 60451789 60451784 -
caaatatatgcttttggtggct

SEQ ID NO: 227633 - DNA, 22 bp, Artificial Sequence
  Synthetic oligonucleotide; TTC chr2 60451783 60451804 60451788 60451783 -
aaatatatgcttttggtggcta

SEQ ID NO: 227634 - DNA, 22 bp, Artificial Sequence
  Synthetic oligonucleotide; CTT chr2 60451771 60451792 60451776 60451771 -
ttggtggctaccatgcaggatt

SEQ ID NO: 227635 - DNA, 22 bp, Artificial Sequence
  Synthetic oligonucleotide; TTT chr2 60451770 60451791 60451775 60451770 -
tggtggctaccatgcaggattt

SEQ ID NO: 227636 - DNA, 22 bp, Artificial Sequence
  Synthetic oligonucleotide; TTT chr2 60451769 60451790 60451774 60451769 -
ggtggctaccatgcaggatttg

SEQ ID NO: 227637 - DNA, 22 bp, Artificial Sequence
  Synthetic oligonucleotide; TTG chr2 60451768 60451789 60451773 60451768 -
gtggctaccatgcaggatttga

SEQ ID NO: 227638 - DNA, 22 bp, Artificial Sequence
  Synthetic oligonucleotide; CTA chr2 60451761 60451782 60451766 60451761 -
ccatgcaggatttgaatttgtc

SEQ ID NO: 227639 - DNA, 22 bp, Artificial Sequence
  Synthetic oligonucleotide; TTT chr2 60451748 60451769 60451753 60451748 -
gaatttgtcttttaatttagct

SEQ ID NO: 227640 - DNA, 22 bp, Artificial Sequence
  Synthetic oligonucleotide; TTG chr2 60451747 60451768 60451752 60451747 -
aatttgtcttttaatttagctt

SEQ ID NO: 227641 - DNA, 22 bp, Artificial Sequence
  Synthetic oligonucleotide; TTT chr2 60451742 60451763 60451747 60451742 -
gtcttttaatttagcttaggaa

SEQ ID NO: 227642 - DNA, 22 bp, Artificial Sequence
  Synthetic oligonucleotide; TTG chr2 60451741 60451762 60451746 60451741 -
tcttttaatttagcttaggaaa

SEQ ID NO: 227643 - DNA, 22 bp, Artificial Sequence
  Synthetic oligonucleotide; CTT chr2 60451737 60451758 60451742 60451737 -
ttaatttagcttaggaaagaac

SEQ ID NO: 227644 - DNA, 22 bp, Artificial Sequence
  Synthetic oligonucleotide; TTT chr2 60451736 60451757 60451741 60451736 -
taatttagcttaggaaagaaca

SEQ ID NO: 227645 - DNA, 22 bp, Artificial Sequence
  Synthetic oligonucleotide; TTT chr2 60451735 60451756 60451740 60451735 -
aatttagcttaggaaagaacat

SEQ ID NO: 227646 - DNA, 22 bp, Artificial Sequence
  Synthetic oligonucleotide; TTA chr2 60451734 60451755 60451739 60451734 -
atttagcttaggaaagaacatc

SEQ ID NO: 227647 - DNA, 22 bp, Artificial Sequence
  Synthetic oligonucleotide; TTT chr2 60451730 60451751 60451735 60451730 -
agcttaggaaagaacatcactg

SEQ ID NO: 227648 - DNA, 22 bp, Artificial Sequence
  Synthetic oligonucleotide; TTA chr2 60451729 60451750 60451734 60451729 -
gcttaggaaagaacatcactgg

SEQ ID NO: 227649 - DNA, 22 bp, Artificial Sequence
  Synthetic oligonucleotide; CTT chr2 60451725 60451746 60451730 60451725 -
aggaaagaacatcactgggcga

SEQ ID NO: 227650 - DNA, 22 bp, Artificial Sequence
  Synthetic oligonucleotide; TTA chr2 60451724 60451745 60451729 60451724 -
ggaaagaacatcactgggcgag

SEQ ID NO: 227651 - DNA, 22 bp, Artificial Sequence
  Synthetic oligonucleotide; CTG chr2 60451708 60451729 60451713 60451708 -
ggcgagcggtaaatcctaaaga

SEQ ID NO: 227652 - DNA, 22 bp, Artificial Sequence
  Synthetic oligonucleotide; CTA chr2 60451690 60451711 60451695 60451690 -
aagaaggtgataaatgtcagta

SEQ ID NO: 227653 - DNA, 22 bp, Artificial Sequence
  Synthetic oligonucleotide; TTT chr2 60451664 60451685 60451669 60451664 -
cttattaaatattctaatttta

SEQ ID NO: 227654 - DNA, 22 bp, Artificial Sequence
  Synthetic oligonucleotide; TTC chr2 60451663 60451684 60451668 60451663 -
ttattaaatattctaattttag

SEQ ID NO: 227655 - DNA, 22 bp, Artificial Sequence
  Synthetic oligonucleotide; CTT chr2 60451661 60451682 60451666 60451661 -
attaaatattctaattttaggt

SEQ ID NO: 227656 - DNA, 22 bp, Artificial Sequence
  Synthetic oligonucleotide; TTA chr2 60451660 60451681 60451665 60451660 -
ttaaatattctaattttaggtt

SEQ ID NO: 227657 - DNA, 22 bp, Artificial Sequence
  Synthetic oligonucleotide; TTA chr2 60451657 60451678 60451662 60451657 -
aatattctaattttaggttccc

SEQ ID NO: 227658 - DNA, 22 bp, Artificial Sequence
  Synthetic oligonucleotide; TTC chr2 60451650 60451671 60451655 60451650 -
taattttaggttcccaaacctt

SEQ ID NO: 227659 - DNA, 22 bp, Artificial Sequence
  Synthetic oligonucleotide; CTA chr2 60451648 60451669 60451653 60451648 -
attttaggttcccaaaccttca

SEQ ID NO: 227660 - DNA, 22 bp, Artificial Sequence
  Synthetic oligonucleotide; TTT chr2 60451644 60451665 60451649 60451644 -
taggttcccaaaccttcaggaa

SEQ ID NO: 227661 - DNA, 22 bp, Artificial Sequence
  Synthetic oligonucleotide; TTT chr2 60451643 60451664 60451648 60451643 -
aggttcccaaaccttcaggaaa

SEQ ID NO: 227662 - DNA, 22 bp, Artificial Sequence
  Synthetic oligonucleotide; TTA chr2 60451642 60451663 60451647 60451642 -
ggttcccaaaccttcaggaaat

SEQ ID NO: 227663 - DNA, 22 bp, Artificial Sequence
  Synthetic oligonucleotide; TTC chr2 60451637 60451658 60451642 60451637 -
ccaaaccttcaggaaatatatc

SEQ ID NO: 227664 - DNA, 22 bp, Artificial Sequence
  Synthetic oligonucleotide; CTT chr2 60451628 60451649 60451633 60451628 -
caggaaatatatcttaatgcag

SEQ ID NO: 227665 - DNA, 22 bp, Artificial Sequence
  Synthetic oligonucleotide; TTC chr2 60451627 60451648 60451632 60451627 -
aggaaatatatcttaatgcaga

SEQ ID NO: 227666 - DNA, 22 bp, Artificial Sequence
  Synthetic oligonucleotide; CTT chr2 60451613 60451634 60451618 60451613 -
aatgcagacaaacaaacataaa

SEQ ID NO: 227667 - DNA, 22 bp, Artificial Sequence
  Synthetic oligonucleotide; TTA chr2 60451612 60451633 60451617 60451612 -
atgcagacaaacaaacataaaa

SEQ ID NO: 227668 - DNA, 22 bp, Artificial Sequence
  Synthetic oligonucleotide; CTT chr2 60451587 60451608 60451592 60451587 -
ctttagtacttacatcaggaaa

SEQ ID NO: 227669 - DNA, 22 bp, Artificial Sequence
  Synthetic oligonucleotide; TTC chr2 60451586 60451607 60451591 60451586 -
tttagtacttacatcaggaaat

SEQ ID NO: 227670 - DNA, 22 bp, Artificial Sequence
  Synthetic oligonucleotide; CTT chr2 60451584 60451605 60451589 60451584 -
tagtacttacatcaggaaattt

SEQ ID NO: 227671 - DNA, 22 bp, Artificial Sequence
  Synthetic oligonucleotide; TTT chr2 60451583 60451604 60451588 60451583 -
agtacttacatcaggaaatttg

SEQ ID NO: 227672 - DNA, 22 bp, Artificial Sequence
  Synthetic oligonucleotide; TTA chr2 60451582 60451603 60451587 60451582 -
gtacttacatcaggaaatttgg

SEQ ID NO: 227673 - DNA, 22 bp, Artificial Sequence
  Synthetic oligonucleotide; CTT chr2 60451576 60451597 60451581 60451576 -
acatcaggaaatttggggcaga

SEQ ID NO: 227674 - DNA, 22 bp, Artificial Sequence
  Synthetic oligonucleotide; TTA chr2 60451575 60451596 60451580 60451575 -
catcaggaaatttggggcagat

SEQ ID NO: 227675 - DNA, 22 bp, Artificial Sequence
  Synthetic oligonucleotide; TTT chr2 60451562 60451583 60451567 60451562 -
ggggcagattttagagggggga

SEQ ID NO: 227676 - DNA, 22 bp, Artificial Sequence
  Synthetic oligonucleotide; TTG chr2 60451561 60451582 60451566 60451561 -
gggcagattttagaggggggaa

SEQ ID NO: 227677 - DNA, 22 bp, Artificial Sequence
  Synthetic oligonucleotide; TTT chr2 60451551 60451572 60451556 60451551 -
tagaggggggaaattataggag

SEQ ID NO: 227678 - DNA, 22 bp, Artificial Sequence
  Synthetic oligonucleotide; TTT chr2 60451550 60451571 60451555 60451550 -
agaggggggaaattataggagg

SEQ ID NO: 227679 - DNA, 22 bp, Artificial Sequence
  Synthetic oligonucleotide; TTA chr2 60451549 60451570 60451554 60451549 -
gaggggggaaattataggagga

SEQ ID NO: 227680 - DNA, 22 bp, Artificial Sequence
  Synthetic oligonucleotide; TTA chr2 60451535 60451556 60451540 60451535 -
taggaggaaagaagttcacatc

SEQ ID NO: 227681 - DNA, 22 bp, Artificial Sequence
  Synthetic oligonucleotide; TTC chr2 60451518 60451539 60451523 60451518 -
acatcagaacagacaatcacag

SEQ ID NO: 227682 - DNA, 22 bp, Artificial Sequence
  Synthetic oligonucleotide; CTC chr2 60451488 60451509 60451493 60451488 -
tattccttagaaattagtgcca

SEQ ID NO: 227683 - DNA, 22 bp, Artificial Sequence
  Synthetic oligonucleotide; CTA chr2 60451486 60451507 60451491 60451486 -
ttccttagaaattagtgccaca

SEQ ID NO: 227684 - DNA, 22 bp, Artificial Sequence
  Synthetic oligonucleotide; TTC chr2 60451483 60451504 60451488 60451483 -
cttagaaattagtgccacaaat

SEQ ID NO: 227685 - DNA, 22 bp, Artificial Sequence
  Synthetic oligonucleotide; CTT chr2 60451480 60451501 60451485 60451480 -
agaaattagtgccacaaataag

SEQ ID NO: 227686 - DNA, 22 bp, Artificial Sequence
  Synthetic oligonucleotide; TTA chr2 60451479 60451500 60451484 60451479 -
gaaattagtgccacaaataagt

SEQ ID NO: 227687 - DNA, 22 bp, Artificial Sequence
  Synthetic oligonucleotide; TTA chr2 60451472 60451493 60451477 60451472 -
gtgccacaaataagttacatct

SEQ ID NO: 227688 - DNA, 22 bp, Artificial Sequence
  Synthetic oligonucleotide; TTA chr2 60451455 60451476 60451460 60451455 -
catctacaaacaggtggtaaaa

SEQ ID NO: 227689 - DNA, 22 bp, Artificial Sequence
  Synthetic oligonucleotide; CTA chr2 60451449 60451470 60451454 60451449 -
caaacaggtggtaaaaattctt

SEQ ID NO: 227690 - DNA, 22 bp, Artificial Sequence
  Synthetic oligonucleotide; TTC chr2 60451429 60451450 60451434 60451429 -
tttctggcccagttaatttgca

SEQ ID NO: 227691 - DNA, 22 bp, Artificial Sequence
  Synthetic oligonucleotide; CTT chr2 60451427 60451448 60451432 60451427 -
tctggcccagttaatttgcaca

SEQ ID NO: 227692 - DNA, 22 bp, Artificial Sequence
  Synthetic oligonucleotide; TTT chr2 60451426 60451447 60451431 60451426 -
ctggcccagttaatttgcacag

SEQ ID NO: 227693 - DNA, 22 bp, Artificial Sequence
  Synthetic oligonucleotide; TTC chr2 60451425 60451446 60451430 60451425 -
tggcccagttaatttgcacaga

SEQ ID NO: 227694 - DNA, 22 bp, Artificial Sequence
  Synthetic oligonucleotide; CTG chr2 60451423 60451444 60451428 60451423 -
gcccagttaatttgcacagaac

SEQ ID NO: 227695 - DNA, 22 bp, Artificial Sequence
  Synthetic oligonucleotide; TTA chr2 60451414 60451435 60451419 60451414 -
atttgcacagaacttttctcag

SEQ ID NO: 227696 - DNA, 22 bp, Artificial Sequence
  Synthetic oligonucleotide; TTT chr2 60451410 60451431 60451415 60451410 -
gcacagaacttttctcagtttg

SEQ ID NO: 227697 - DNA, 22 bp, Artificial Sequence
  Synthetic oligonucleotide; TTG chr2 60451409 60451430 60451414 60451409 -
cacagaacttttctcagtttgg

SEQ ID NO: 227698 - DNA, 22 bp, Artificial Sequence
  Synthetic oligonucleotide; CTT chr2 60451399 60451420 60451404 60451399 -
ttctcagtttggtattttttac

SEQ ID NO: 227699 - DNA, 22 bp, Artificial Sequence
  Synthetic oligonucleotide; TTT chr2 60451398 60451419 60451403 60451398 -
tctcagtttggtattttttact

SEQ ID NO: 227700 - DNA, 22 bp, Artificial Sequence
  Synthetic oligonucleotide; TTT chr2 60451397 60451418 60451402 60451397 -
ctcagtttggtattttttactg

SEQ ID NO: 227701 - DNA, 22 bp, Artificial Sequence
  Synthetic oligonucleotide; TTC chr2 60451396 60451417 60451401 60451396 -
tcagtttggtattttttactgc

SEQ ID NO: 227702 - DNA, 22 bp, Artificial Sequence
  Synthetic oligonucleotide; CTC chr2 60451394 60451415 60451399 60451394 -
agtttggtattttttactgctt

SEQ ID NO: 227703 - DNA, 22 bp, Artificial Sequence
  Synthetic oligonucleotide; TTT chr2 60451389 60451410 60451394 60451389 -
ggtattttttactgcttggaga

SEQ ID NO: 227704 - DNA, 22 bp, Artificial Sequence
  Synthetic oligonucleotide; TTG chr2 60451388 60451409 60451393 60451388 -
gtattttttactgcttggagat

SEQ ID NO: 227705 - DNA, 22 bp, Artificial Sequence
  Synthetic oligonucleotide; TTT chr2 60451382 60451403 60451387 60451382 -
tttactgcttggagatccagaa

SEQ ID NO: 227706 - DNA, 22 bp, Artificial Sequence
  Synthetic oligonucleotide; TTT chr2 60451381 60451402 60451386 60451381 -
ttactgcttggagatccagaag

SEQ ID NO: 227707 - DNA, 22 bp, Artificial Sequence
  Synthetic oligonucleotide; TTT chr2 60451380 60451401 60451385 60451380 -
tactgcttggagatccagaaga

SEQ ID NO: 227708 - DNA, 22 bp, Artificial Sequence
  Synthetic oligonucleotide; TTT chr2 60451379 60451400 60451384 60451379 -
actgcttggagatccagaagag

SEQ ID NO: 227709 - DNA, 22 bp, Artificial Sequence
  Synthetic oligonucleotide; TTA chr2 60451378 60451399 60451383 60451378 -
ctgcttggagatccagaagaga

SEQ ID NO: 227710 - DNA, 22 bp, Artificial Sequence
  Synthetic oligonucleotide; CTG chr2 60451375 60451396 60451380 60451375 -
cttggagatccagaagagaatt

SEQ ID NO: 227711 - DNA, 22 bp, Artificial Sequence
  Synthetic oligonucleotide; CTT chr2 60451372 60451393 60451377 60451372 -
ggagatccagaagagaattaga

SEQ ID NO: 227712 - DNA, 22 bp, Artificial Sequence
  Synthetic oligonucleotide; TTG chr2 60451371 60451392 60451376 60451371 -
gagatccagaagagaattagaa

SEQ ID NO: 227713 - DNA, 22 bp, Artificial Sequence
  Synthetic oligonucleotide; TTA chr2 60451352 60451373 60451357 60451352 -
gaaacaacatagcaaattaaaa

SEQ ID NO: 227714 - DNA, 22 bp, Artificial Sequence
  Synthetic oligonucleotide; TTA chr2 60451333 60451354 60451338 60451333 -
aaataggtttgtcaataataga

SEQ ID NO: 227715 - DNA, 22 bp, Artificial Sequence
  Synthetic oligonucleotide; TTT chr2 60451323 60451344 60451328 60451323 -
gtcaataatagagctcagacac

SEQ ID NO: 227716 - DNA, 22 bp, Artificial Sequence
  Synthetic oligonucleotide; TTG chr2 60451322 60451343 60451327 60451322 -
tcaataatagagctcagacacc

SEQ ID NO: 227717 - DNA, 22 bp, Artificial Sequence
  Synthetic oligonucleotide; CTC chr2 60451307 60451328 60451312 60451307 -
agacacctgtgtgctgtagatt

SEQ ID NO: 227718 - DNA, 22 bp, Artificial Sequence
  Synthetic oligonucleotide; CTG chr2 60451298 60451319 60451303 60451298 -
tgtgctgtagattcacatacag

SEQ ID NO: 227719 - DNA, 22 bp, Artificial Sequence
  Synthetic oligonucleotide; CTG chr2 60451291 60451312 60451296 60451291 -
tagattcacatacaggccgtga

SEQ ID NO: 227720 - DNA, 22 bp, Artificial Sequence
  Synthetic oligonucleotide; TTC chr2 60451284 60451305 60451289 60451284 -
acatacaggccgtgaacctaag

SEQ ID NO: 227721 - DNA, 22 bp, Artificial Sequence
  Synthetic oligonucleotide; CTA chr2 60451264 60451285 60451269 60451264 -
agtggggaaaatcctacctatc

SEQ ID NO: 227722 - DNA, 22 bp, Artificial Sequence
  Synthetic oligonucleotide; CTA chr2 60451248 60451269 60451253 60451248 -
cctatccaccttctggctagat

SEQ ID NO: 227723 - DNA, 22 bp, Artificial Sequence
  Synthetic oligonucleotide; CTA chr2 60451244 60451265 60451249 60451244 -
tccaccttctggctagattacc

SEQ ID NO: 227724 - DNA, 22 bp, Artificial Sequence
  Synthetic oligonucleotide; CTT chr2 60451236 60451257 60451241 60451236 -
ctggctagattacctagcttag

SEQ ID NO: 227725 - DNA, 22 bp, Artificial Sequence
  Synthetic oligonucleotide; TTC chr2 60451235 60451256 60451240 60451235 -
tggctagattacctagcttagt

SEQ ID NO: 227726 - DNA, 22 bp, Artificial Sequence
  Synthetic oligonucleotide; CTG chr2 60451233 60451254 60451238 60451233 -
gctagattacctagcttagtga

SEQ ID NO: 227727 - DNA, 22 bp, Artificial Sequence
  Synthetic oligonucleotide; CTA chr2 60451229 60451250 60451234 60451229 -
gattacctagcttagtgaaaag

SEQ ID NO: 227728 - DNA, 22 bp, Artificial Sequence
  Synthetic oligonucleotide; TTA chr2 60451224 60451245 60451229 60451224 -
cctagcttagtgaaaagatagc

SEQ ID NO: 227729 - DNA, 22 bp, Artificial Sequence
  Synthetic oligonucleotide; CTA chr2 60451220 60451241 60451225 60451220 -
gcttagtgaaaagatagccaaa

SEQ ID NO: 227730 - DNA, 22 bp, Artificial Sequence
  Synthetic oligonucleotide; CTT chr2 60451216 60451237 60451221 60451216 -
agtgaaaagatagccaaataat

SEQ ID NO: 227731 - DNA, 22 bp, Artificial Sequence
  Synthetic oligonucleotide; TTA chr2 60451215 60451236 60451220 60451215 -
gtgaaaagatagccaaataatt

SEQ ID NO: 227732 - DNA, 22 bp, Artificial Sequence
  Synthetic oligonucleotide; TTG chr2 60451192 60451213 60451197 60451192 -
gcatgtgaattatttcctgctt

SEQ ID NO: 227733 - DNA, 22 bp, Artificial Sequence
  Synthetic oligonucleotide; TTA chr2 60451180 60451201 60451185 60451180 -
tttcctgcttattcataataaa

SEQ ID NO: 227734 - DNA, 22 bp, Artificial Sequence
  Synthetic oligonucleotide; TTT chr2 60451177 60451198 60451182 60451177 -
cctgcttattcataataaataa

SEQ ID NO: 227735 - DNA, 22 bp, Artificial Sequence
  Synthetic oligonucleotide; TTC chr2 60451176 60451197 60451181 60451176 -
ctgcttattcataataaataat

SEQ ID NO: 227736 - DNA, 22 bp, Artificial Sequence
  Synthetic oligonucleotide; CTG chr2 60451173 60451194 60451178 60451173 -
cttattcataataaataatgac

SEQ ID NO: 227737 - DNA, 22 bp, Artificial Sequence
  Synthetic oligonucleotide; CTT chr2 60451170 60451191 60451175 60451170 -
attcataataaataatgactgt

SEQ ID NO: 227738 - DNA, 22 bp, Artificial Sequence
  Synthetic oligonucleotide; TTA chr2 60451169 60451190 60451174 60451169 -
ttcataataaataatgactgtc

SEQ ID NO: 227739 - DNA, 22 bp, Artificial Sequence
  Synthetic oligonucleotide; TTC chr2 60451166 60451187 60451171 60451166 -
ataataaataatgactgtctac

SEQ ID NO: 227740 - DNA, 22 bp, Artificial Sequence
  Synthetic oligonucleotide; CTG chr2 60451149 60451170 60451154 60451149 -
tctacagtagtgaactacctta

SEQ ID NO: 227741 - DNA, 22 bp, Artificial Sequence
  Synthetic oligonucleotide; CTA chr2 60451145 60451166 60451150 60451145 -
cagtagtgaactaccttatact

SEQ ID NO: 227742 - DNA, 22 bp, Artificial Sequence
  Synthetic oligonucleotide; CTA chr2 60451132 60451153 60451137 60451132 -
ccttatactgtatacagtgctg

SEQ ID NO: 227743 - DNA, 22 bp, Artificial Sequence
  Synthetic oligonucleotide; CTT chr2 60451128 60451149 60451133 60451128 -
atactgtatacagtgctgtctc

SEQ ID NO: 227744 - DNA, 22 bp, Artificial Sequence
  Synthetic oligonucleotide; TTA chr2 60451127 60451148 60451132 60451127 -
tactgtatacagtgctgtctcg

SEQ ID NO: 227745 - DNA, 22 bp, Artificial Sequence
  Synthetic oligonucleotide; CTG chr2 60451122 60451143 60451127 60451122 -
tatacagtgctgtctcgtgcat

SEQ ID NO: 227746 - DNA, 22 bp, Artificial Sequence
  Synthetic oligonucleotide; CTG chr2 60451110 60451131 60451115 60451110 -
tctcgtgcattatttcacctgc

SEQ ID NO: 227747 - DNA, 22 bp, Artificial Sequence
  Synthetic oligonucleotide; CTC chr2 60451106 60451127 60451111 60451106 -
gtgcattatttcacctgctctc

SEQ ID NO: 227748 - DNA, 22 bp, Artificial Sequence
  Synthetic oligonucleotide; TTA chr2 60451098 60451119 60451103 60451098 -
tttcacctgctctctgggacag

SEQ ID NO: 227749 - DNA, 22 bp, Artificial Sequence
  Synthetic oligonucleotide; TTT chr2 60451095 60451116 60451100 60451095 -
cacctgctctctgggacagatc

SEQ ID NO: 227750 - DNA, 22 bp, Artificial Sequence
  Synthetic oligonucleotide; TTC chr2 60451094 60451115 60451099 60451094 -
acctgctctctgggacagatct

SEQ ID NO: 227751 - DNA, 22 bp, Artificial Sequence
  Synthetic oligonucleotide; CTG chr2 60451089 60451110 60451094 60451089 -
ctctctgggacagatctcacga

SEQ ID NO: 227752 - DNA, 22 bp, Artificial Sequence
  Synthetic oligonucleotide; CTC chr2 60451086 60451107 60451091 60451086 -
tctgggacagatctcacgactt

SEQ ID NO: 227753 - DNA, 22 bp, Artificial Sequence
  Synthetic oligonucleotide; CTC chr2 60451084 60451105 60451089 60451084 -
tgggacagatctcacgacttct

SEQ ID NO: 227754 - DNA, 22 bp, Artificial Sequence
  Synthetic oligonucleotide; CTG chr2 60451082 60451103 60451087 60451082 -
ggacagatctcacgacttctac

SEQ ID NO: 227755 - DNA, 22 bp, Artificial Sequence
  Synthetic oligonucleotide; CTC chr2 60451071 60451092 60451076 60451071 -
acgacttctactttatggaggt

SEQ ID NO: 227756 - DNA, 22 bp, Artificial Sequence
  Synthetic oligonucleotide; CTT chr2 60451064 60451085 60451069 60451064 -
ctactttatggaggtggagatt

SEQ ID NO: 227757 - DNA, 22 bp, Artificial Sequence
  Synthetic oligonucleotide; TTC chr2 60451063 60451084 60451068 60451063 -
tactttatggaggtggagattg

SEQ ID NO: 227758 - DNA, 22 bp, Artificial Sequence
  Synthetic oligonucleotide; CTA chr2 60451061 60451082 60451066 60451061 -
ctttatggaggtggagattgag

SEQ ID NO: 227759 - DNA, 22 bp, Artificial Sequence
  Synthetic oligonucleotide; CTT chr2 60451058 60451079 60451063 60451058 -
tatggaggtggagattgaggct

SEQ ID NO: 227760 - DNA, 22 bp, Artificial Sequence
  Synthetic oligonucleotide; TTT chr2 60451057 60451078 60451062 60451057 -
atggaggtggagattgaggctt

SEQ ID NO: 227761 - DNA, 22 bp, Artificial Sequence
  Synthetic oligonucleotide; TTA chr2 60451056 60451077 60451061 60451056 -
tggaggtggagattgaggctta

SEQ ID NO: 227762 - DNA, 22 bp, Artificial Sequence
  Synthetic oligonucleotide; TTG chr2 60451041 60451062 60451046 60451041 -
aggcttaccaaggttaagggct

SEQ ID NO: 227763 - DNA, 22 bp, Artificial Sequence
  Synthetic oligonucleotide; CTT chr2 60451035 60451056 60451040 60451035 -
accaaggttaagggcttgccag

SEQ ID NO: 227764 - DNA, 22 bp, Artificial Sequence
  Synthetic oligonucleotide; TTA chr2 60451034 60451055 60451039 60451034 -
ccaaggttaagggcttgccaga

SEQ ID NO: 227765 - DNA, 22 bp, Artificial Sequence
  Synthetic oligonucleotide; TTA chr2 60451025 60451046 60451030 60451025 -
agggcttgccagaggccacatc

SEQ ID NO: 227766 - DNA, 22 bp, Artificial Sequence
  Synthetic oligonucleotide; CTT chr2 60451018 60451039 60451023 60451018 -
gccagaggccacatcagtaaga

SEQ ID NO: 227767 - DNA, 22 bp, Artificial Sequence
  Synthetic oligonucleotide; TTG chr2 60451017 60451038 60451022 60451017 -
ccagaggccacatcagtaagag

SEQ ID NO: 227768 - DNA, 22 bp, Artificial Sequence
  Synthetic oligonucleotide; TTT chr2 60450973 60450994 60450978 60450973 -
tctggtttcttgtccagagcta

SEQ ID NO: 227769 - DNA, 22 bp, Artificial Sequence
  Synthetic oligonucleotide; TTT chr2 60450972 60450993 60450977 60450972 -
ctggtttcttgtccagagctaa

SEQ ID NO: 227770 - DNA, 22 bp, Artificial Sequence
  Synthetic oligonucleotide; TTC chr2 60450971 60450992 60450976 60450971 -
tggtttcttgtccagagctaat

SEQ ID NO: 227771 - DNA, 22 bp, Artificial Sequence
  Synthetic oligonucleotide; CTG chr2 60450969 60450990 60450974 60450969 -
gtttcttgtccagagctaattt

SEQ ID NO: 227772 - DNA, 22 bp, Artificial Sequence
  Synthetic oligonucleotide; TTT chr2 60450965 60450986 60450970 60450965 -
cttgtccagagctaatttcacc

SEQ ID NO: 227773 - DNA, 22 bp, Artificial Sequence
  Synthetic oligonucleotide; TTC chr2 60450964 60450985 60450969 60450964 -
ttgtccagagctaatttcacca

SEQ ID NO: 227774 - DNA, 22 bp, Artificial Sequence
  Synthetic oligonucleotide; CTT chr2 60450962 60450983 60450967 60450962 -
gtccagagctaatttcaccaaa

SEQ ID NO: 227775 - DNA, 22 bp, Artificial Sequence
  Synthetic oligonucleotide; TTG chr2 60450961 60450982 60450966 60450961 -
tccagagctaatttcaccaaac

SEQ ID NO: 227776 - DNA, 22 bp, Artificial Sequence
  Synthetic oligonucleotide; CTA chr2 60450951 60450972 60450956 60450951 -
atttcaccaaactctgtttaac

SEQ ID NO: 227777 - DNA, 22 bp, Artificial Sequence
  Synthetic oligonucleotide; TTT chr2 60450947 60450968 60450952 60450947 -
caccaaactctgtttaactgat

SEQ ID NO: 227778 - DNA, 22 bp, Artificial Sequence
  Synthetic oligonucleotide; TTC chr2 60450946 60450967 60450951 60450946 -
accaaactctgtttaactgatc

SEQ ID NO: 227779 - DNA, 22 bp, Artificial Sequence
  Synthetic oligonucleotide; CTC chr2 60450937 60450958 60450942 60450937 -
tgtttaactgatcaaagggagt

SEQ ID NO: 227780 - DNA, 22 bp, Artificial Sequence
  Synthetic oligonucleotide; CTG chr2 60450935 60450956 60450940 60450935 -
tttaactgatcaaagggagtat

SEQ ID NO: 227781 - DNA, 22 bp, Artificial Sequence
  Synthetic oligonucleotide; TTT chr2 60450932 60450953 60450937 60450932 -
aactgatcaaagggagtatctt

SEQ ID NO: 227782 - DNA, 22 bp, Artificial Sequence
  Synthetic oligonucleotide; TTA chr2 60450931 60450952 60450936 60450931 -
actgatcaaagggagtatcttt

SEQ ID NO: 227783 - DNA, 22 bp, Artificial Sequence
  Synthetic oligonucleotide; CTG chr2 60450927 60450948 60450932 60450927 -
atcaaagggagtatcttttcct

SEQ ID NO: 227784 - DNA, 22 bp, Artificial Sequence
  Synthetic oligonucleotide; CTT chr2 60450910 60450931 60450915 60450910 -
ttcctgtgttagcacataagtc

SEQ ID NO: 227785 - DNA, 22 bp, Artificial Sequence
  Synthetic oligonucleotide; TTT chr2 60450909 60450930 60450914 60450909 -
tcctgtgttagcacataagtca

SEQ ID NO: 227786 - DNA, 22 bp, Artificial Sequence
  Synthetic oligonucleotide; TTT chr2 60450908 60450929 60450913 60450908 -
cctgtgttagcacataagtcat

SEQ ID NO: 227787 - DNA, 22 bp, Artificial Sequence
  Synthetic oligonucleotide; TTC chr2 60450907 60450928 60450912 60450907 -
ctgtgttagcacataagtcata

SEQ ID NO: 227788 - DNA, 22 bp, Artificial Sequence
  Synthetic oligonucleotide; CTG chr2 60450904 60450925 60450909 60450904 -
tgttagcacataagtcataaat

SEQ ID NO: 227789 - DNA, 22 bp, Artificial Sequence
  Synthetic oligonucleotide; TTA chr2 60450899 60450920 60450904 60450899 -
gcacataagtcataaatgttca

SEQ ID NO: 227790 - DNA, 22 bp, Artificial Sequence
  Synthetic oligonucleotide; TTC chr2 60450878 60450899 60450883 60450878 -
acagacacacacatgtggctta

SEQ ID NO: 227791 - DNA, 22 bp, Artificial Sequence
  Synthetic oligonucleotide; CTT chr2 60450857 60450878 60450862 60450857 -
acacatacagacccaggatggc

SEQ ID NO: 227792 - DNA, 22 bp, Artificial Sequence
  Synthetic oligonucleotide; TTA chr2 60450856 60450877 60450861 60450856 -
cacatacagacccaggatggcc

SEQ ID NO: 227793 - DNA, 22 bp, Artificial Sequence
  Synthetic oligonucleotide; CTT chr2 60450832 60450853 60450837 60450832 -
tggtaaaggcatgcagagttgc

SEQ ID NO: 227794 - DNA, 22 bp, Artificial Sequence
  Synthetic oligonucleotide; TTT chr2 60450831 60450852 60450836 60450831 -
ggtaaaggcatgcagagttgcc

SEQ ID NO: 227795 - DNA, 22 bp, Artificial Sequence
  Synthetic oligonucleotide; TTG chr2 60450830 60450851 60450835 60450830 -
gtaaaggcatgcagagttgcct

SEQ ID NO: 227796 - DNA, 22 bp, Artificial Sequence
  Synthetic oligonucleotide; TTG chr2 60450811 60450832 60450816 60450811 -
cctcttcctaccaacagatgtg

SEQ ID NO: 227797 - DNA, 22 bp, Artificial Sequence
  Synthetic oligonucleotide; CTC chr2 60450807 60450828 60450812 60450807 -
ttcctaccaacagatgtgtgca

SEQ ID NO: 227798 - DNA, 22 bp, Artificial Sequence
  Synthetic oligonucleotide; CTT chr2 60450805 60450826 60450810 60450805 -
cctaccaacagatgtgtgcact

SEQ ID NO: 227799 - DNA, 22 bp, Artificial Sequence
  Synthetic oligonucleotide; TTC chr2 60450804 60450825 60450809 60450804 -
ctaccaacagatgtgtgcactg

SEQ ID NO: 227800 - DNA, 22 bp, Artificial Sequence
  Synthetic oligonucleotide; CTA chr2 60450801 60450822 60450806 60450801 -
ccaacagatgtgtgcactgaga

SEQ ID NO: 227801 - DNA, 22 bp, Artificial Sequence
  Synthetic oligonucleotide; CTG chr2 60450782 60450803 60450787 60450782 -
agaaagggaggttgcagcctcc

SEQ ID NO: 227802 - DNA, 22 bp, Artificial Sequence
  Synthetic oligonucleotide; TTG chr2 60450768 60450789 60450773 60450768 -
cagcctccttgccatcaccttt

SEQ ID NO: 227803 - DNA, 22 bp, Artificial Sequence
  Synthetic oligonucleotide; CTC chr2 60450761 60450782 60450766 60450761 -
cttgccatcacctttcccctgt

SEQ ID NO: 227804 - DNA, 22 bp, Artificial Sequence
  Synthetic oligonucleotide; CTT chr2 60450758 60450779 60450763 60450758 -
gccatcacctttcccctgtggc

SEQ ID NO: 227805 - DNA, 22 bp, Artificial Sequence
  Synthetic oligonucleotide; TTG chr2 60450757 60450778 60450762 60450757 -
ccatcacctttcccctgtggct

SEQ ID NO: 227806 - DNA, 22 bp, Artificial Sequence
  Synthetic oligonucleotide; CTT chr2 60450747 60450768 60450752 60450747 -
tcccctgtggcttttccatgac

SEQ ID NO: 227807 - DNA, 22 bp, Artificial Sequence
  Synthetic oligonucleotide; TTT chr2 60450746 60450767 60450751 60450746 -
cccctgtggcttttccatgaca

SEQ ID NO: 227808 - DNA, 22 bp, Artificial Sequence
  Synthetic oligonucleotide; TTC chr2 60450745 60450766 60450750 60450745 -
ccctgtggcttttccatgacaa

SEQ ID NO: 227809 - DNA, 22 bp, Artificial Sequence
  Synthetic oligonucleotide; CTG chr2 60450740 60450761 60450745 60450740 -
tggcttttccatgacaaataac

SEQ ID NO: 227810 - DNA, 22 bp, Artificial Sequence
  Synthetic oligonucleotide; CTT chr2 60450734 60450755 60450739 60450734 -
ttccatgacaaataaccctgat

SEQ ID NO: 227811 - DNA, 22 bp, Artificial Sequence
  Synthetic oligonucleotide; TTT chr2 60450733 60450754 60450738 60450733 -
tccatgacaaataaccctgatt

SEQ ID NO: 227812 - DNA, 22 bp, Artificial Sequence
  Synthetic oligonucleotide; TTT chr2 60450732 60450753 60450737 60450732 -
ccatgacaaataaccctgattg

SEQ ID NO: 227813 - DNA, 22 bp, Artificial Sequence
  Synthetic oligonucleotide; TTC chr2 60450731 60450752 60450736 60450731 -
catgacaaataaccctgattgc

SEQ ID NO: 227814 - DNA, 22 bp, Artificial Sequence
  Synthetic oligonucleotide; CTG chr2 60450714 60450735 60450719 60450714 -
attgcacgagtggcctgtttgt

SEQ ID NO: 227815 - DNA, 22 bp, Artificial Sequence
  Synthetic oligonucleotide; TTG chr2 60450710 60450731 60450715 60450710 -
cacgagtggcctgtttgtgact

SEQ ID NO: 227816 - DNA, 22 bp, Artificial Sequence
  Synthetic oligonucleotide; CTG chr2 60450697 60450718 60450702 60450697 -
tttgtgacttcctatcaattag

SEQ ID NO: 227817 - DNA, 22 bp, Artificial Sequence
  Synthetic oligonucleotide; TTT chr2 60450694 60450715 60450699 60450694 -
gtgacttcctatcaattagttg

SEQ ID NO: 227818 - DNA, 22 bp, Artificial Sequence
  Synthetic oligonucleotide; TTG chr2 60450693 60450714 60450698 60450693 -
tgacttcctatcaattagttgg

SEQ ID NO: 227819 - DNA, 22 bp, Artificial Sequence
  Synthetic oligonucleotide; CTT chr2 60450687 60450708 60450692 60450687 -
cctatcaattagttgggacttc

SEQ ID NO: 227820 - DNA, 22 bp, Artificial Sequence
  Synthetic oligonucleotide; TTC chr2 60450686 60450707 60450691 60450686 -
ctatcaattagttgggacttcc

SEQ ID NO: 227821 - DNA, 22 bp, Artificial Sequence
  Synthetic oligonucleotide; CTA chr2 60450683 60450704 60450688 60450683 -
tcaattagttgggacttccaga

SEQ ID NO: 227822 - DNA, 22 bp, Artificial Sequence
  Synthetic oligonucleotide; TTA chr2 60450676 60450697 60450681 60450676 -
gttgggacttccagacaagaag

SEQ ID NO: 227823 - DNA, 22 bp, Artificial Sequence
  Synthetic oligonucleotide; TTG chr2 60450672 60450693 60450677 60450672 -
ggacttccagacaagaagttat

SEQ ID NO: 227824 - DNA, 22 bp, Artificial Sequence
  Synthetic oligonucleotide; CTT chr2 60450666 60450687 60450671 60450666 -
ccagacaagaagttatttcata

SEQ ID NO: 227825 - DNA, 22 bp, Artificial Sequence
  Synthetic oligonucleotide; TTC chr2 60450665 60450686 60450670 60450665 -
cagacaagaagttatttcataa

SEQ ID NO: 227826 - DNA, 22 bp, Artificial Sequence
  Synthetic oligonucleotide; TTA chr2 60450651 60450672 60450656 60450651 -
tttcataaagaaaccctctccc

SEQ ID NO: 227827 - DNA, 22 bp, Artificial Sequence
  Synthetic oligonucleotide; TTT chr2 60450648 60450669 60450653 60450648 -
cataaagaaaccctctccctgc

SEQ ID NO: 227828 - DNA, 22 bp, Artificial Sequence
  Synthetic oligonucleotide; TTC chr2 60450647 60450668 60450652 60450647 -
ataaagaaaccctctccctgcc

SEQ ID NO: 227829 - DNA, 22 bp, Artificial Sequence
  Synthetic oligonucleotide; CTC chr2 60450633 60450654 60450638 60450633 -
tccctgccccatgctctgccta

SEQ ID NO: 227830 - DNA, 22 bp, Artificial Sequence
  Synthetic oligonucleotide; CTC chr2 60450631 60450652 60450636 60450631 -
cctgccccatgctctgcctatg

SEQ ID NO: 227831 - DNA, 22 bp, Artificial Sequence
  Synthetic oligonucleotide; CTG chr2 60450627 60450648 60450632 60450627 -
ccccatgctctgcctatgtgtt

SEQ ID NO: 227832 - DNA, 22 bp, Artificial Sequence
  Synthetic oligonucleotide; CTC chr2 60450617 60450638 60450622 60450617 -
tgcctatgtgttgctgaaacat

SEQ ID NO: 227833 - DNA, 22 bp, Artificial Sequence
  Synthetic oligonucleotide; CTG chr2 60450615 60450636 60450620 60450615 -
cctatgtgttgctgaaacataa

SEQ ID NO: 227834 - DNA, 22 bp, Artificial Sequence
  Synthetic oligonucleotide; CTA chr2 60450611 60450632 60450616 60450611 -
tgtgttgctgaaacataagacc

SEQ ID NO: 227835 - DNA, 22 bp, Artificial Sequence
  Synthetic oligonucleotide; TTG chr2 60450604 60450625 60450609 60450604 -
ctgaaacataagaccattaggg

SEQ ID NO: 227836 - DNA, 22 bp, Artificial Sequence
  Synthetic oligonucleotide; CTG chr2 60450601 60450622 60450606 60450601 -
aaacataagaccattagggttt

SEQ ID NO: 227837 - DNA, 22 bp, Artificial Sequence
  Synthetic oligonucleotide; TTA chr2 60450585 60450606 60450590 60450585 -
gggtttctgtgatggcttcctc

SEQ ID NO: 227838 - DNA, 22 bp, Artificial Sequence
  Synthetic oligonucleotide; TTT chr2 60450579 60450600 60450584 60450579 -
ctgtgatggcttcctccctaaa

SEQ ID NO: 227839 - DNA, 22 bp, Artificial Sequence
  Synthetic oligonucleotide; TTC chr2 60450578 60450599 60450583 60450578 -
tgtgatggcttcctccctaaat

SEQ ID NO: 227840 - DNA, 22 bp, Artificial Sequence
  Synthetic oligonucleotide; CTG chr2 60450576 60450597 60450581 60450576 -
tgatggcttcctccctaaatgt

SEQ ID NO: 227841 - DNA, 22 bp, Artificial Sequence
  Synthetic oligonucleotide; CTT chr2 60450567 60450588 60450572 60450567 -
cctccctaaatgtgctgaactc

SEQ ID NO: 227842 - DNA, 22 bp, Artificial Sequence
  Synthetic oligonucleotide; TTC chr2 60450566 60450587 60450571 60450566 -
ctccctaaatgtgctgaactcc

SEQ ID NO: 227843 - DNA, 22 bp, Artificial Sequence
  Synthetic oligonucleotide; CTC chr2 60450563 60450584 60450568 60450563 -
cctaaatgtgctgaactccttg

SEQ ID NO: 227844 - DNA, 22 bp, Artificial Sequence
  Synthetic oligonucleotide; CTA chr2 60450559 60450580 60450564 60450559 -
aatgtgctgaactccttgctga

SEQ ID NO: 227845 - DNA, 22 bp, Artificial Sequence
  Synthetic oligonucleotide; CTG chr2 60450550 60450571 60450555 60450550 -
aactccttgctgatgcctagaa

SEQ ID NO: 227846 - DNA, 22 bp, Artificial Sequence
  Synthetic oligonucleotide; CTC chr2 60450545 60450566 60450550 60450545 -
cttgctgatgcctagaaagagt

SEQ ID NO: 227847 - DNA, 22 bp, Artificial Sequence
  Synthetic oligonucleotide; CTT chr2 60450542 60450563 60450547 60450542 -
gctgatgcctagaaagagtgac

SEQ ID NO: 227848 - DNA, 22 bp, Artificial Sequence
  Synthetic oligonucleotide; TTG chr2 60450541 60450562 60450546 60450541 -
ctgatgcctagaaagagtgaca

SEQ ID NO: 227849 - DNA, 22 bp, Artificial Sequence
  Synthetic oligonucleotide; CTG chr2 60450538 60450559 60450543 60450538 -
atgcctagaaagagtgacacca

SEQ ID NO: 227850 - DNA, 22 bp, Artificial Sequence
  Synthetic oligonucleotide; CTA chr2 60450531 60450552 60450536 60450531 -
gaaagagtgacaccacttccaa

SEQ ID NO: 227851 - DNA, 22 bp, Artificial Sequence
  Synthetic oligonucleotide; CTT chr2 60450513 60450534 60450518 60450513 -
ccaaagggaggccagaactgaa

SEQ ID NO: 227852 - DNA, 22 bp, Artificial Sequence
  Synthetic oligonucleotide; TTC chr2 60450512 60450533 60450517 60450512 -
caaagggaggccagaactgaaa

SEQ ID NO: 227853 - DNA, 22 bp, Artificial Sequence
  Synthetic oligonucleotide; CTG chr2 60450493 60450514 60450498 60450493 -
aaacaacaatcctgggtcttga

SEQ ID NO: 227854 - DNA, 22 bp, Artificial Sequence
  Synthetic oligonucleotide; CTG chr2 60450479 60450500 60450484 60450479 -
ggtcttgagacaagttcagcct

SEQ ID NO: 227855 - DNA, 22 bp, Artificial Sequence
  Synthetic oligonucleotide; CTT chr2 60450473 60450494 60450478 60450473 -
gagacaagttcagcctttgtaa

SEQ ID NO: 227856 - DNA, 22 bp, Artificial Sequence
  Synthetic oligonucleotide; TTG chr2 60450472 60450493 60450477 60450472 -
agacaagttcagcctttgtaac

SEQ ID NO: 227857 - DNA, 22 bp, Artificial Sequence
  Synthetic oligonucleotide; TTC chr2 60450462 60450483 60450467 60450462 -
agcctttgtaactgcacttggt

SEQ ID NO: 227858 - DNA, 22 bp, Artificial Sequence
  Synthetic oligonucleotide; CTT chr2 60450456 60450477 60450461 60450456 -
tgtaactgcacttggtggtcac

SEQ ID NO: 227859 - DNA, 22 bp, Artificial Sequence
  Synthetic oligonucleotide; TTT chr2 60450455 60450476 60450460 60450455 -
gtaactgcacttggtggtcact

SEQ ID NO: 227860 - DNA, 22 bp, Artificial Sequence
  Synthetic oligonucleotide; TTG chr2 60450454 60450475 60450459 60450454 -
taactgcacttggtggtcacta

SEQ ID NO: 227861 - DNA, 22 bp, Artificial Sequence
  Synthetic oligonucleotide; CTG chr2 60450448 60450469 60450453 60450448 -
cacttggtggtcactacacttt

SEQ ID NO: 227862 - DNA, 22 bp, Artificial Sequence
  Synthetic oligonucleotide; CTT chr2 60450443 60450464 60450448 60450443 -
ggtggtcactacactttcattt

SEQ ID NO: 227863 - DNA, 22 bp, Artificial Sequence
  Synthetic oligonucleotide; TTG chr2 60450442 60450463 60450447 60450442 -
gtggtcactacactttcatttc

SEQ ID NO: 227864 - DNA, 22 bp, Artificial Sequence
  Synthetic oligonucleotide; CTA chr2 60450432 60450453 60450437 60450432 -
cactttcatttctggtctgtgt

SEQ ID NO: 227865 - DNA, 22 bp, Artificial Sequence
  Synthetic oligonucleotide; CTT chr2 60450427 60450448 60450432 60450427 -
tcatttctggtctgtgtttcta

SEQ ID NO: 227866 - DNA, 22 bp, Artificial Sequence
  Synthetic oligonucleotide; TTT chr2 60450426 60450447 60450431 60450426 -
catttctggtctgtgtttctac

SEQ ID NO: 227867 - DNA, 22 bp, Artificial Sequence
  Synthetic oligonucleotide; TTC chr2 60450425 60450446 60450430 60450425 -
atttctggtctgtgtttctacc

SEQ ID NO: 227868 - DNA, 22 bp, Artificial Sequence
  Synthetic oligonucleotide; TTT chr2 60450421 60450442 60450426 60450421 -
ctggtctgtgtttctaccccca

SEQ ID NO: 227869 - DNA, 22 bp, Artificial Sequence
  Synthetic oligonucleotide; TTC chr2 60450420 60450441 60450425 60450420 -
tggtctgtgtttctacccccac

SEQ ID NO: 227870 - DNA, 22 bp, Artificial Sequence
  Synthetic oligonucleotide; CTG chr2 60450418 60450439 60450423 60450418 -
gtctgtgtttctacccccactt

SEQ ID NO: 227871 - DNA, 22 bp, Artificial Sequence
  Synthetic oligonucleotide; CTG chr2 60450413 60450434 60450418 60450413 -
tgtttctacccccactttttat

SEQ ID NO: 227872 - DNA, 22 bp, Artificial Sequence
  Synthetic oligonucleotide; TTT chr2 60450408 60450429 60450413 60450408 -
ctacccccactttttatatatt

SEQ ID NO: 227873 - DNA, 22 bp, Artificial Sequence
  Synthetic oligonucleotide; TTC chr2 60450407 60450428 60450412 60450407 -
tacccccactttttatatattt

SEQ ID NO: 227874 - DNA, 22 bp, Artificial Sequence
  Synthetic oligonucleotide; CTA chr2 60450405 60450426 60450410 60450405 -
cccccactttttatatatttct

SEQ ID NO: 227875 - DNA, 22 bp, Artificial Sequence
  Synthetic oligonucleotide; CTT chr2 60450396 60450417 60450401 60450396 -
tttatatatttcttctcagagt

SEQ ID NO: 227876 - DNA, 22 bp, Artificial Sequence
  Synthetic oligonucleotide; TTT chr2 60450395 60450416 60450400 60450395 -
ttatatatttcttctcagagtc

SEQ ID NO: 227877 - DNA, 22 bp, Artificial Sequence
  Synthetic oligonucleotide; TTT chr2 60450394 60450415 60450399 60450394 -
tatatatttcttctcagagtca

SEQ ID NO: 227878 - DNA, 22 bp, Artificial Sequence
  Synthetic oligonucleotide; TTT chr2 60450393 60450414 60450398 60450393 -
atatatttcttctcagagtcag

SEQ ID NO: 227879 - DNA, 22 bp, Artificial Sequence
  Synthetic oligonucleotide; TTA chr2 60450392 60450413 60450397 60450392 -
tatatttcttctcagagtcagt

SEQ ID NO: 227880 - DNA, 22 bp, Artificial Sequence
  Synthetic oligonucleotide; TTT chr2 60450385 60450406 60450390 60450385 -
cttctcagagtcagtttgtaaa

SEQ ID NO: 227881 - DNA, 22 bp, Artificial Sequence
  Synthetic oligonucleotide; TTC chr2 60450384 60450405 60450389 60450384 -
ttctcagagtcagtttgtaaat

SEQ ID NO: 227882 - DNA, 22 bp, Artificial Sequence
  Synthetic oligonucleotide; CTT chr2 60450382 60450403 60450387 60450382 -
ctcagagtcagtttgtaaataa

SEQ ID NO: 227883 - DNA, 22 bp, Artificial Sequence
  Synthetic oligonucleotide; TTC chr2 60450381 60450402 60450386 60450381 -
tcagagtcagtttgtaaataag

SEQ ID NO: 227884 - DNA, 22 bp, Artificial Sequence
  Synthetic oligonucleotide; CTC chr2 60450379 60450400 60450384 60450379 -
agagtcagtttgtaaataagtg

SEQ ID NO: 227885 - DNA, 22 bp, Artificial Sequence
  Synthetic oligonucleotide; TTT chr2 60450368 60450389 60450373 60450368 -
gtaaataagtggatatctctaa

SEQ ID NO: 227886 - DNA, 22 bp, Artificial Sequence
  Synthetic oligonucleotide; TTG chr2 60450367 60450388 60450372 60450367 -
taaataagtggatatctctaaa

SEQ ID NO: 227887 - DNA, 22 bp, Artificial Sequence
  Synthetic oligonucleotide; CTC chr2 60450349 60450370 60450354 60450349 -
taaaagtgggatttttaagggg

SEQ ID NO: 227888 - DNA, 22 bp, Artificial Sequence
  Synthetic oligonucleotide; CTA chr2 60450347 60450368 60450352 60450347 -
aaagtgggatttttaaggggca

SEQ ID NO: 227889 - DNA, 22 bp, Artificial Sequence
  Synthetic oligonucleotide; TTT chr2 60450335 60450356 60450340 60450335 -
ttaaggggcaagaggataacag

SEQ ID NO: 227890 - DNA, 22 bp, Artificial Sequence
  Synthetic oligonucleotide; TTT chr2 60450334 60450355 60450339 60450334 -
taaggggcaagaggataacaga

SEQ ID NO: 227891 - DNA, 22 bp, Artificial Sequence
  Synthetic oligonucleotide; TTT chr2 60450333 60450354 60450338 60450333 -
aaggggcaagaggataacagaa

SEQ ID NO: 227892 - DNA, 22 bp, Artificial Sequence
  Synthetic oligonucleotide; TTA chr2 60450332 60450353 60450337 60450332 -
aggggcaagaggataacagaag

SEQ ID NO: 227893 - DNA, 22 bp, Artificial Sequence
  Synthetic oligonucleotide; TTG chr2 60450294 60450315 60450299 60450294 -
ttttatcctcttcactgtggag

SEQ ID NO: 227894 - DNA, 22 bp, Artificial Sequence
  Synthetic oligonucleotide; TTT chr2 60450291 60450312 60450296 60450291 -
tatcctcttcactgtggagaag

SEQ ID NO: 227895 - DNA, 22 bp, Artificial Sequence
  Synthetic oligonucleotide; TTT chr2 60450290 60450311 60450295 60450290 -
atcctcttcactgtggagaaga

SEQ ID NO: 227896 - DNA, 22 bp, Artificial Sequence
  Synthetic oligonucleotide; TTA chr2 60450289 60450310 60450294 60450289 -
tcctcttcactgtggagaagaa

SEQ ID NO: 227897 - DNA, 22 bp, Artificial Sequence
  Synthetic oligonucleotide; CTC chr2 60450284 60450305 60450289 60450284 -
ttcactgtggagaagaaccccc

SEQ ID NO: 227898 - DNA, 22 bp, Artificial Sequence
  Synthetic oligonucleotide; CTT chr2 60450282 60450303 60450287 60450282 -
cactgtggagaagaaccccctc

SEQ ID NO: 227899 - DNA, 22 bp, Artificial Sequence
  Synthetic oligonucleotide; TTC chr2 60450281 60450302 60450286 60450281 -
actgtggagaagaaccccctca

SEQ ID NO: 227900 - DNA, 22 bp, Artificial Sequence
  Synthetic oligonucleotide; CTG chr2 60450277 60450298 60450282 60450277 -
tggagaagaaccccctcaaaac

SEQ ID NO: 227901 - DNA, 22 bp, Artificial Sequence
  Synthetic oligonucleotide; CTC chr2 60450260 60450281 60450265 60450260 -
aaaacaaacagaacaaaaagac

SEQ ID NO: 227902 - DNA, 22 bp, Artificial Sequence
  Synthetic oligonucleotide; CTG chr2 60450236 60450257 60450241 60450236 -
tcttttcccatggcttttaaag

SEQ ID NO: 227903 - DNA, 22 bp, Artificial Sequence
  Synthetic oligonucleotide; CTT chr2 60450232 60450253 60450237 60450232 -
ttcccatggcttttaaagttga

SEQ ID NO: 227904 - DNA, 22 bp, Artificial Sequence
  Synthetic oligonucleotide; TTT chr2 60450231 60450252 60450236 60450231 -
tcccatggcttttaaagttgaa

SEQ ID NO: 227905 - DNA, 22 bp, Artificial Sequence
  Synthetic oligonucleotide; TTT chr2 60450230 60450251 60450235 60450230 -
cccatggcttttaaagttgaaa

SEQ ID NO: 227906 - DNA, 22 bp, Artificial Sequence
  Synthetic oligonucleotide; TTC chr2 60450229 60450250 60450234 60450229 -
ccatggcttttaaagttgaaag

SEQ ID NO: 227907 - DNA, 22 bp, Artificial Sequence
  Synthetic oligonucleotide; CTT chr2 60450220 60450241 60450225 60450220 -
ttaaagttgaaagacaacaaaa

SEQ ID NO: 227908 - DNA, 22 bp, Artificial Sequence
  Synthetic oligonucleotide; TTT chr2 60450219 60450240 60450224 60450219 -
taaagttgaaagacaacaaaaa

SEQ ID NO: 227909 - DNA, 22 bp, Artificial Sequence
  Synthetic oligonucleotide; TTT chr2 60450218 60450239 60450223 60450218 -
aaagttgaaagacaacaaaaat

SEQ ID NO: 227910 - DNA, 22 bp, Artificial Sequence
  Synthetic oligonucleotide; TTA chr2 60450217 60450238 60450222 60450217 -
aagttgaaagacaacaaaaatt

SEQ ID NO: 227911 - DNA, 22 bp, Artificial Sequence
  Synthetic oligonucleotide; TTG chr2 60450211 60450232 60450216 60450211 -
aaagacaacaaaaatttattta

SEQ ID NO: 227912 - DNA, 22 bp, Artificial Sequence
  Synthetic oligonucleotide; TTT chr2 60450194 60450215 60450199 60450194 -
atttacagaatttattaggaaa

SEQ ID NO: 227913 - DNA, 22 bp, Artificial Sequence
  Synthetic oligonucleotide; TTA chr2 60450193 60450214 60450198 60450193 -
tttacagaatttattaggaaac

SEQ ID NO: 227914 - DNA, 22 bp, Artificial Sequence
  Synthetic oligonucleotide; TTT chr2 60450190 60450211 60450195 60450190 -
acagaatttattaggaaacggt

SEQ ID NO: 227915 - DNA, 22 bp, Artificial Sequence
  Synthetic oligonucleotide; TTA chr2 60450189 60450210 60450194 60450189 -
cagaatttattaggaaacggta

SEQ ID NO: 227916 - DNA, 22 bp, Artificial Sequence
  Synthetic oligonucleotide; TTT chr2 60450181 60450202 60450186 60450181 -
attaggaaacggtattgtgtta

SEQ ID NO: 227917 - DNA, 22 bp, Artificial Sequence
  Synthetic oligonucleotide; TTA chr2 60450180 60450201 60450185 60450180 -
ttaggaaacggtattgtgttag

SEQ ID NO: 227918 - DNA, 22 bp, Artificial Sequence
  Synthetic oligonucleotide; TTA chr2 60450177 60450198 60450182 60450177 -
ggaaacggtattgtgttagggc

SEQ ID NO: 227919 - DNA, 22 bp, Artificial Sequence
  Synthetic oligonucleotide; TTG chr2 60450164 60450185 60450169 60450164 -
tgttagggctagccattttttt

SEQ ID NO: 227920 - DNA, 22 bp, Artificial Sequence
  Synthetic oligonucleotide; TTA chr2 60450159 60450180 60450164 60450159 -
gggctagccatttttttttttt

SEQ ID NO: 227921 - DNA, 22 bp, Artificial Sequence
  Synthetic oligonucleotide; CTA chr2 60450153 60450174 60450158 60450153 -
gccatttttttttttttttttt

SEQ ID NO: 227922 - DNA, 22 bp, Artificial Sequence
  Synthetic oligonucleotide; TTT chr2 60450146 60450167 60450151 60450146 -
tttttttttttttttttttttt

SEQ ID NO: 227923 - DNA, 22 bp, Artificial Sequence
  Synthetic oligonucleotide; TTT chr2 60450145 60450166 60450150 60450145 -
ttttttttttttttttttttta

SEQ ID NO: 227924 - DNA, 22 bp, Artificial Sequence
  Synthetic oligonucleotide; TTT chr2 60450144 60450165 60450149 60450144 -
ttttttttttttttttttttaa

SEQ ID NO: 227925 - DNA, 22 bp, Artificial Sequence
  Synthetic oligonucleotide; TTT chr2 60450143 60450164 60450148 60450143 -
tttttttttttttttttttaag

SEQ ID NO: 227926 - DNA, 22 bp, Artificial Sequence
  Synthetic oligonucleotide; TTT chr2 60450142 60450163 60450147 60450142 -
ttttttttttttttttttaaga

SEQ ID NO: 227927 - DNA, 22 bp, Artificial Sequence
  Synthetic oligonucleotide; TTT chr2 60450141 60450162 60450146 60450141 -
tttttttttttttttttaagac

SEQ ID NO: 227928 - DNA, 22 bp, Artificial Sequence
  Synthetic oligonucleotide; TTT chr2 60450140 60450161 60450145 60450140 -
ttttttttttttttttaagaca

SEQ ID NO: 227929 - DNA, 22 bp, Artificial Sequence
  Synthetic oligonucleotide; TTT chr2 60450139 60450160 60450144 60450139 -
tttttttttttttttaagacag

SEQ ID NO: 227930 - DNA, 22 bp, Artificial Sequence
  Synthetic oligonucleotide; TTT chr2 60450138 60450159 60450143 60450138 -
ttttttttttttttaagacaga

SEQ ID NO: 227931 - DNA, 22 bp, Artificial Sequence
  Synthetic oligonucleotide; TTT chr2 60450137 60450158 60450142 60450137 -
tttttttttttttaagacagaa

SEQ ID NO: 227932 - DNA, 22 bp, Artificial Sequence
  Synthetic oligonucleotide; TTT chr2 60450136 60450157 60450141 60450136 -
ttttttttttttaagacagaat

SEQ ID NO: 227933 - DNA, 22 bp, Artificial Sequence
  Synthetic oligonucleotide; TTT chr2 60450135 60450156 60450140 60450135 -
tttttttttttaagacagaatc

SEQ ID NO: 227934 - DNA, 22 bp, Artificial Sequence
  Synthetic oligonucleotide; TTT chr2 60450134 60450155 60450139 60450134 -
ttttttttttaagacagaatct

SEQ ID NO: 227935 - DNA, 22 bp, Artificial Sequence
  Synthetic oligonucleotide; TTT chr2 60450133 60450154 60450138 60450133 -
tttttttttaagacagaatctc

SEQ ID NO: 227936 - DNA, 22 bp, Artificial Sequence
  Synthetic oligonucleotide; TTT chr2 60450132 60450153 60450137 60450132 -
ttttttttaagacagaatctcg

SEQ ID NO: 227937 - DNA, 22 bp, Artificial Sequence
  Synthetic oligonucleotide; TTT chr2 60450131 60450152 60450136 60450131 -
tttttttaagacagaatctcgc

SEQ ID NO: 227938 - DNA, 22 bp, Artificial Sequence
  Synthetic oligonucleotide; TTT chr2 60450130 60450151 60450135 60450130 -
ttttttaagacagaatctcgct

SEQ ID NO: 227939 - DNA, 22 bp, Artificial Sequence
  Synthetic oligonucleotide; TTT chr2 60450129 60450150 60450134 60450129 -
tttttaagacagaatctcgctc

SEQ ID NO: 227940 - DNA, 22 bp, Artificial Sequence
  Synthetic oligonucleotide; TTT chr2 60450128 60450149 60450133 60450128 -
ttttaagacagaatctcgctct

SEQ ID NO: 227941 - DNA, 22 bp, Artificial Sequence
  Synthetic oligonucleotide; TTT chr2 60450127 60450148 60450132 60450127 -
tttaagacagaatctcgctctg

SEQ ID NO: 227942 - DNA, 22 bp, Artificial Sequence
  Synthetic oligonucleotide; TTT chr2 60450126 60450147 60450131 60450126 -
ttaagacagaatctcgctctgt

SEQ ID NO: 227943 - DNA, 22 bp, Artificial Sequence
  Synthetic oligonucleotide; TTT chr2 60450125 60450146 60450130 60450125 -
taagacagaatctcgctctgtc

SEQ ID NO: 227944 - DNA, 22 bp, Artificial Sequence
  Synthetic oligonucleotide; TTT chr2 60450124 60450145 60450129 60450124 -
aagacagaatctcgctctgtca

SEQ ID NO: 227945 - DNA, 22 bp, Artificial Sequence
  Synthetic oligonucleotide; TTA chr2 60450123 60450144 60450128 60450123 -
agacagaatctcgctctgtcac

SEQ ID NO: 227946 - DNA, 22 bp, Artificial Sequence
  Synthetic oligonucleotide; CTC chr2 60450111 60450132 60450116 60450111 -
gctctgtcacccaggctggagt

SEQ ID NO: 227947 - DNA, 22 bp, Artificial Sequence
  Synthetic oligonucleotide; CTC chr2 60450107 60450128 60450112 60450107 -
tgtcacccaggctggagtgcag

SEQ ID NO: 227948 - DNA, 22 bp, Artificial Sequence
  Synthetic oligonucleotide; CTG chr2 60450105 60450126 60450110 60450105 -
tcacccaggctggagtgcagtg

SEQ ID NO: 227949 - DNA, 22 bp, Artificial Sequence
  Synthetic oligonucleotide; CTG chr2 60450093 60450114 60450098 60450093 -
gagtgcagtggcaaggactcag

SEQ ID NO: 227950 - DNA, 22 bp, Artificial Sequence
  Synthetic oligonucleotide; CTC chr2 60450073 60450094 60450078 60450073 -
agctcaccacaacctccgccta

SEQ ID NO: 227951 - DNA, 22 bp, Artificial Sequence
  Synthetic oligonucleotide; CTC chr2 60450068 60450089 60450073 60450068 -
accacaacctccgcctactggg

SEQ ID NO: 227952 - DNA, 22 bp, Artificial Sequence
  Synthetic oligonucleotide; CTC chr2 60450057 60450078 60450062 60450057 -
cgcctactgggttcaagggatc

SEQ ID NO: 227953 - DNA, 22 bp, Artificial Sequence
  Synthetic oligonucleotide; CTA chr2 60450051 60450072 60450056 60450051 -
ctgggttcaagggatcctcctg

SEQ ID NO: 227954 - DNA, 22 bp, Artificial Sequence
  Synthetic oligonucleotide; CTG chr2 60450048 60450069 60450053 60450048 -
ggttcaagggatcctcctgcct

SEQ ID NO: 227955 - DNA, 22 bp, Artificial Sequence
  Synthetic oligonucleotide; TTC chr2 60450043 60450064 60450048 60450043 -
aagggatcctcctgcctcagct

SEQ ID NO: 227956 - DNA, 22 bp, Artificial Sequence
  Synthetic oligonucleotide; CTC chr2 60450032 60450053 60450037 60450032 -
ctgcctcagcttcccaagtagc

SEQ ID NO: 227957 - DNA, 22 bp, Artificial Sequence
  Synthetic oligonucleotide; CTG chr2 60450029 60450050 60450034 60450029 -
cctcagcttcccaagtagctgg

SEQ ID NO: 227958 - DNA, 22 bp, Artificial Sequence
  Synthetic oligonucleotide; CTC chr2 60450025 60450046 60450030 60450025 -
agcttcccaagtagctgggact

SEQ ID NO: 227959 - DNA, 22 bp, Artificial Sequence
  Synthetic oligonucleotide; CTT chr2 60450020 60450041 60450025 60450020 -
cccaagtagctgggactacagg

SEQ ID NO: 227960 - DNA, 22 bp, Artificial Sequence
  Synthetic oligonucleotide; TTC chr2 60450019 60450040 60450024 60450019 -
ccaagtagctgggactacaggc

SEQ ID NO: 227961 - DNA, 22 bp, Artificial Sequence
  Synthetic oligonucleotide; CTG chr2 60450008 60450029 60450013 60450008 -
ggactacaggcacgcgccacca

SEQ ID NO: 227962 - DNA, 22 bp, Artificial Sequence
  Synthetic oligonucleotide; CTA chr2 60450002 60450023 60450007 60450002 -
caggcacgcgccaccacgccca

SEQ ID NO: 227963 - DNA, 22 bp, Artificial Sequence
  Synthetic oligonucleotide; CTA chr2 60449976 60449997 60449981 60449976 -
atattttttgtatttttagtag

SEQ ID NO: 227964 - DNA, 22 bp, Artificial Sequence
  Synthetic oligonucleotide; TTT chr2 60449970 60449991 60449975 60449970 -
tttgtatttttagtagatacgg

SEQ ID NO: 227965 - DNA, 22 bp, Artificial Sequence
  Synthetic oligonucleotide; TTT chr2 60449969 60449990 60449974 60449969 -
ttgtatttttagtagatacggc

SEQ ID NO: 227966 - DNA, 22 bp, Artificial Sequence
  Synthetic oligonucleotide; TTT chr2 60449968 60449989 60449973 60449968 -
tgtatttttagtagatacggcg

SEQ ID NO: 227967 - DNA, 22 bp, Artificial Sequence
  Synthetic oligonucleotide; TTT chr2 60449967 60449988 60449972 60449967 -
gtatttttagtagatacggcgt

SEQ ID NO: 227968 - DNA, 22 bp, Artificial Sequence
  Synthetic oligonucleotide; TTG chr2 60449966 60449987 60449971 60449966 -
tatttttagtagatacggcgtt

SEQ ID NO: 227969 - DNA, 22 bp, Artificial Sequence
  Synthetic oligonucleotide; TTT chr2 60449961 60449982 60449966 60449961 -
ttagtagatacggcgtttcacc

SEQ ID NO: 227970 - DNA, 22 bp, Artificial Sequence
  Synthetic oligonucleotide; TTT chr2 60449960 60449981 60449965 60449960 -
tagtagatacggcgtttcaccg

SEQ ID NO: 227971 - DNA, 22 bp, Artificial Sequence
  Synthetic oligonucleotide; TTT chr2 60449959 60449980 60449964 60449959 -
agtagatacggcgtttcaccgt

SEQ ID NO: 227972 - DNA, 22 bp, Artificial Sequence
  Synthetic oligonucleotide; TTA chr2 60449958 60449979 60449963 60449958 -
gtagatacggcgtttcaccgtg

SEQ ID NO: 227973 - DNA, 22 bp, Artificial Sequence
  Synthetic oligonucleotide; TTT chr2 60449943 60449964 60449948 60449943 -
caccgtgttagccaggatggtc

SEQ ID NO: 227974 - DNA, 22 bp, Artificial Sequence
  Synthetic oligonucleotide; TTC chr2 60449942 60449963 60449947 60449942 -
accgtgttagccaggatggtct

SEQ ID NO: 227975 - DNA, 22 bp, Artificial Sequence
  Synthetic oligonucleotide; TTA chr2 60449933 60449954 60449938 60449933 -
gccaggatggtctccatctcct

SEQ ID NO: 227976 - DNA, 22 bp, Artificial Sequence
  Synthetic oligonucleotide; CTC chr2 60449919 60449940 60449924 60449919 -
catctcctgatctcgtgatcca

SEQ ID NO: 227977 - DNA, 22 bp, Artificial Sequence
  Synthetic oligonucleotide; CTC chr2 60449913 60449934 60449918 60449913 -
ctgatctcgtgatccaccctcc

SEQ ID NO: 227978 - DNA, 22 bp, Artificial Sequence
  Synthetic oligonucleotide; CTG chr2 60449910 60449931 60449915 60449910 -
atctcgtgatccaccctcctag

SEQ ID NO: 227979 - DNA, 22 bp, Artificial Sequence
  Synthetic oligonucleotide; CTC chr2 60449905 60449926 60449910 60449905 -
gtgatccaccctcctaggcctc

SEQ ID NO: 227980 - DNA, 22 bp, Artificial Sequence
  Synthetic oligonucleotide; CTC chr2 60449892 60449913 60449897 60449892 -
ctaggcctcccatagtgctggg

SEQ ID NO: 227981 - DNA, 22 bp, Artificial Sequence
  Synthetic oligonucleotide; CTA chr2 60449889 60449910 60449894 60449889 -
ggcctcccatagtgctgggatt

SEQ ID NO: 227982 - DNA, 22 bp, Artificial Sequence
  Synthetic oligonucleotide; CTC chr2 60449883 60449904 60449888 60449883 -
ccatagtgctgggattagaggc

SEQ ID NO: 227983 - DNA, 22 bp, Artificial Sequence
  Synthetic oligonucleotide; CTG chr2 60449872 60449893 60449877 60449872 -
ggattagaggcattgcactacc

SEQ ID NO: 227984 - DNA, 22 bp, Artificial Sequence
  Synthetic oligonucleotide; TTA chr2 60449866 60449887 60449871 60449866 -
gaggcattgcactacctcacct

SEQ ID NO: 227985 - DNA, 22 bp, Artificial Sequence
  Synthetic oligonucleotide; TTG chr2 60449857 60449878 60449862 60449857 -
cactacctcacctggcctaggg

SEQ ID NO: 227986 - DNA, 22 bp, Artificial Sequence
  Synthetic oligonucleotide; CTA chr2 60449852 60449873 60449857 60449852 -
cctcacctggcctagggctaga

SEQ ID NO: 227987 - DNA, 22 bp, Artificial Sequence
  Synthetic oligonucleotide; CTC chr2 60449848 60449869 60449853 60449848 -
acctggcctagggctagacttt

SEQ ID NO: 227988 - DNA, 22 bp, Artificial Sequence
  Synthetic oligonucleotide; CTG chr2 60449843 60449864 60449848 60449843 -
gcctagggctagacttttgaaa

SEQ ID NO: 227989 - DNA, 22 bp, Artificial Sequence
  Synthetic oligonucleotide; CTA chr2 60449838 60449859 60449843 60449838 -
gggctagacttttgaaacccca

SEQ ID NO: 227990 - DNA, 22 bp, Artificial Sequence
  Synthetic oligonucleotide; CTA chr2 60449832 60449853 60449837 60449832 -
gacttttgaaaccccatacaag

SEQ ID NO: 227991 - DNA, 22 bp, Artificial Sequence
  Synthetic oligonucleotide; CTT chr2 60449827 60449848 60449832 60449827 -
ttgaaaccccatacaagattga

SEQ ID NO: 227992 - DNA, 22 bp, Artificial Sequence
  Synthetic oligonucleotide; TTT chr2 60449826 60449847 60449831 60449826 -
tgaaaccccatacaagattgac

SEQ ID NO: 227993 - DNA, 22 bp, Artificial Sequence
  Synthetic oligonucleotide; TTT chr2 60449825 60449846 60449830 60449825 -
gaaaccccatacaagattgaca

SEQ ID NO: 227994 - DNA, 22 bp, Artificial Sequence
  Synthetic oligonucleotide; TTG chr2 60449824 60449845 60449829 60449824 -
aaaccccatacaagattgacaa

SEQ ID NO: 227995 - DNA, 22 bp, Artificial Sequence
  Synthetic oligonucleotide; TTG chr2 60449806 60449827 60449811 60449806 -
acaatttgggaagacatctctc

SEQ ID NO: 227996 - DNA, 22 bp, Artificial Sequence
  Synthetic oligonucleotide; TTT chr2 60449799 60449820 60449804 60449799 -
gggaagacatctctctgtgtga

SEQ ID NO: 227997 - DNA, 22 bp, Artificial Sequence
  Synthetic oligonucleotide; TTG chr2 60449798 60449819 60449803 60449798 -
ggaagacatctctctgtgtgat

SEQ ID NO: 227998 - DNA, 22 bp, Artificial Sequence
  Synthetic oligonucleotide; CTC chr2 60449786 60449807 60449791 60449786 -
tctgtgtgatgagtcaagatca

SEQ ID NO: 227999 - DNA, 22 bp, Artificial Sequence
  Synthetic oligonucleotide; CTC chr2 60449784 60449805 60449789 60449784 -
tgtgtgatgagtcaagatcatg

SEQ ID NO: 228000 - DNA, 22 bp, Artificial Sequence
  Synthetic oligonucleotide; CTG chr2 60449782 60449803 60449787 60449782 -
tgtgatgagtcaagatcatggt

SEQ ID NO: 228001 - DNA, 22 bp, Artificial Sequence
  Synthetic oligonucleotide; TTA chr2 60449758 60449779 60449763 60449758 -
tccatgaatggcagaagcaggg

SEQ ID NO: 228002 - DNA, 22 bp, Artificial Sequence
  Synthetic oligonucleotide; CTC chr2 60449727 60449748 60449732 60449727 -
acaaatctgccaggggttctca

SEQ ID NO: 228003 - DNA, 22 bp, Artificial Sequence
  Synthetic oligonucleotide; CTG chr2 60449718 60449739 60449723 60449718 -
ccaggggttctcactgtgtcct

SEQ ID NO: 228004 - DNA, 22 bp, Artificial Sequence
  Synthetic oligonucleotide; TTC chr2 60449708 60449729 60449713 60449708 -
tcactgtgtcctctctgcagag

SEQ ID NO: 228005 - DNA, 22 bp, Artificial Sequence
  Synthetic oligonucleotide; CTC chr2 60449706 60449727 60449711 60449706 -
actgtgtcctctctgcagagtg

SEQ ID NO: 228006 - DNA, 22 bp, Artificial Sequence
  Synthetic oligonucleotide; CTG chr2 60449702 60449723 60449707 60449702 -
tgtcctctctgcagagtggaac

SEQ ID NO: 228007 - DNA, 22 bp, Artificial Sequence
  Synthetic oligonucleotide; CTC chr2 60449695 60449716 60449700 60449695 -
tctgcagagtggaacttcagat

SEQ ID NO: 228008 - DNA, 22 bp, Artificial Sequence
  Synthetic oligonucleotide; CTC chr2 60449693 60449714 60449698 60449693 -
tgcagagtggaacttcagattg

SEQ ID NO: 228009 - DNA, 22 bp, Artificial Sequence
  Synthetic oligonucleotide; CTG chr2 60449691 60449712 60449696 60449691 -
cagagtggaacttcagattgca

SEQ ID NO: 228010 - DNA, 22 bp, Artificial Sequence
  Synthetic oligonucleotide; CTT chr2 60449678 60449699 60449683 60449678 -
cagattgcagagagataaattg

SEQ ID NO: 228011 - DNA, 22 bp, Artificial Sequence
  Synthetic oligonucleotide; TTC chr2 60449677 60449698 60449682 60449677 -
agattgcagagagataaattgg

SEQ ID NO: 228012 - DNA, 22 bp, Artificial Sequence
  Synthetic oligonucleotide; TTG chr2 60449671 60449692 60449676 60449671 -
cagagagataaattggttgcct

SEQ ID NO: 228013 - DNA, 22 bp, Artificial Sequence
  Synthetic oligonucleotide; TTG chr2 60449656 60449677 60449661 60449656 -
gttgcctgacatgagcacagac

SEQ ID NO: 228014 - DNA, 22 bp, Artificial Sequence
  Synthetic oligonucleotide; TTG chr2 60449652 60449673 60449657 60449652 -
cctgacatgagcacagactaga

SEQ ID NO: 228015 - DNA, 22 bp, Artificial Sequence
  Synthetic oligonucleotide; CTG chr2 60449648 60449669 60449653 60449648 -
acatgagcacagactagaggac

SEQ ID NO: 228016 - DNA, 22 bp, Artificial Sequence
  Synthetic oligonucleotide; CTA chr2 60449632 60449653 60449637 60449632 -
gaggacagagtcccagccactt

SEQ ID NO: 228017 - DNA, 22 bp, Artificial Sequence
  Synthetic oligonucleotide; CTT chr2 60449610 60449631 60449615 60449610 -
ggatggaggagaccaaatacag

SEQ ID NO: 228018 - DNA, 22 bp, Artificial Sequence
  Synthetic oligonucleotide; TTG chr2 60449609 60449630 60449614 60449609 -
gatggaggagaccaaatacagg

SEQ ID NO: 228019 - DNA, 22 bp, Artificial Sequence
  Synthetic oligonucleotide; TTG chr2 60449581 60449602 60449586 60449581 -
tttttactttcccaagcctttt

SEQ ID NO: 228020 - DNA, 22 bp, Artificial Sequence
  Synthetic oligonucleotide; TTT chr2 60449578 60449599 60449583 60449578 -
ttactttcccaagccttttgtg

SEQ ID NO: 228021 - DNA, 22 bp, Artificial Sequence
  Synthetic oligonucleotide; TTT chr2 60449577 60449598 60449582 60449577 -
tactttcccaagccttttgtgg

SEQ ID NO: 228022 - DNA, 22 bp, Artificial Sequence
  Synthetic oligonucleotide; TTT chr2 60449576 60449597 60449581 60449576 -
actttcccaagccttttgtggg

SEQ ID NO: 228023 - DNA, 22 bp, Artificial Sequence
  Synthetic oligonucleotide; TTA chr2 60449575 60449596 60449580 60449575 -
ctttcccaagccttttgtgggc

SEQ ID NO: 228024 - DNA, 22 bp, Artificial Sequence
  Synthetic oligonucleotide; CTT chr2 60449572 60449593 60449577 60449572 -
tcccaagccttttgtgggctgt

SEQ ID NO: 228025 - DNA, 22 bp, Artificial Sequence
  Synthetic oligonucleotide; TTT chr2 60449571 60449592 60449576 60449571 -
cccaagccttttgtgggctgtt

SEQ ID NO: 228026 - DNA, 22 bp, Artificial Sequence
  Synthetic oligonucleotide; TTC chr2 60449570 60449591 60449575 60449570 -
ccaagccttttgtgggctgttc

SEQ ID NO: 228027 - DNA, 22 bp, Artificial Sequence
  Synthetic oligonucleotide; CTT chr2 60449561 60449582 60449566 60449561 -
ttgtgggctgttcagattatta

SEQ ID NO: 228028 - DNA, 22 bp, Artificial Sequence
  Synthetic oligonucleotide; TTT chr2 60449560 60449581 60449565 60449560 -
tgtgggctgttcagattattat

SEQ ID NO: 228029 - DNA, 22 bp, Artificial Sequence
  Synthetic oligonucleotide; TTT chr2 60449559 60449580 60449564 60449559 -
gtgggctgttcagattattatt

SEQ ID NO: 228030 - DNA, 22 bp, Artificial Sequence
  Synthetic oligonucleotide; TTG chr2 60449558 60449579 60449563 60449558 -
tgggctgttcagattattatta

SEQ ID NO: 228031 - DNA, 22 bp, Artificial Sequence
  Synthetic oligonucleotide; CTG chr2 60449551 60449572 60449556 60449551 -
ttcagattattattattattat

SEQ ID NO: 228032 - DNA, 22 bp, Artificial Sequence
  Synthetic oligonucleotide; TTC chr2 60449548 60449569 60449553 60449548 -
agattattattattattattat

SEQ ID NO: 228033 - DNA, 22 bp, Artificial Sequence
  Synthetic oligonucleotide; TTA chr2 60449542 60449563 60449547 60449542 -
ttattattattattattattat

SEQ ID NO: 228034 - DNA, 22 bp, Artificial Sequence
  Synthetic oligonucleotide; TTA chr2 60449539 60449560 60449544 60449539 -
ttattattattattattattat

SEQ ID NO: 228035 - DNA, 22 bp, Artificial Sequence
  Synthetic oligonucleotide; TTA chr2 60449536 60449557 60449541 60449536 -
ttattattattattattattat

SEQ ID NO: 228036 - DNA, 22 bp, Artificial Sequence
  Synthetic oligonucleotide; TTA chr2 60449533 60449554 60449538 60449533 -
ttattattattattattattat

SEQ ID NO: 228037 - DNA, 22 bp, Artificial Sequence
  Synthetic oligonucleotide; TTA chr2 60449530 60449551 60449535 60449530 -
ttattattattattattattat

SEQ ID NO: 228038 - DNA, 22 bp, Artificial Sequence
  Synthetic oligonucleotide; TTA chr2 60449527 60449548 60449532 60449527 -
ttattattattattattattat

SEQ ID NO: 228039 - DNA, 22 bp, Artificial Sequence
  Synthetic oligonucleotide; TTA chr2 60449524 60449545 60449529 60449524 -
ttattattattattattattat

SEQ ID NO: 228040 - DNA, 22 bp, Artificial Sequence
  Synthetic oligonucleotide; TTA chr2 60449521 60449542 60449526 60449521 -
ttattattattattattattat

SEQ ID NO: 228041 - DNA, 22 bp, Artificial Sequence
  Synthetic oligonucleotide; TTA chr2 60449518 60449539 60449523 60449518 -
ttattattattattattattgt

SEQ ID NO: 228042 - DNA, 22 bp, Artificial Sequence
  Synthetic oligonucleotide; TTA chr2 60449515 60449536 60449520 60449515 -
ttattattattattattgttga

SEQ ID NO: 228043 - DNA, 22 bp, Artificial Sequence
  Synthetic oligonucleotide; TTA chr2 60449512 60449533 60449517 60449512 -
ttattattattattgttgagat

SEQ ID NO: 228044 - DNA, 22 bp, Artificial Sequence
  Synthetic oligonucleotide; TTA chr2 60449509 60449530 60449514 60449509 -
ttattattattgttgagatgga

SEQ ID NO: 228045 - DNA, 22 bp, Artificial Sequence
  Synthetic oligonucleotide; TTA chr2 60449506 60449527 60449511 60449506 -
ttattattgttgagatggagtc

SEQ ID NO: 228046 - DNA, 22 bp, Artificial Sequence
  Synthetic oligonucleotide; TTA chr2 60449503 60449524 60449508 60449503 -
ttattgttgagatggagtctca

SEQ ID NO: 228047 - DNA, 22 bp, Artificial Sequence
  Synthetic oligonucleotide; TTA chr2 60449500 60449521 60449505 60449500 -
ttgttgagatggagtctcactc

SEQ ID NO: 228048 - DNA, 22 bp, Artificial Sequence
  Synthetic oligonucleotide; TTG chr2 60449497 60449518 60449502 60449497 -
ttgagatggagtctcactctat

SEQ ID NO: 228049 - DNA, 22 bp, Artificial Sequence
  Synthetic oligonucleotide; TTG chr2 60449494 60449515 60449499 60449494 -
agatggagtctcactctattgc

SEQ ID NO: 228050 - DNA, 22 bp, Artificial Sequence
  Synthetic oligonucleotide; CTC chr2 60449482 60449503 60449487 60449482 -
actctattgcccaggctggagt

SEQ ID NO: 228051 - DNA, 22 bp, Artificial Sequence
  Synthetic oligonucleotide; CTC chr2 60449478 60449499 60449483 60449478 -
tattgcccaggctggagtgcaa

SEQ ID NO: 228052 - DNA, 22 bp, Artificial Sequence
  Synthetic oligonucleotide; CTA chr2 60449476 60449497 60449481 60449476 -
ttgcccaggctggagtgcaatg

SEQ ID NO: 228053 - DNA, 22 bp, Artificial Sequence
  Synthetic oligonucleotide; TTG chr2 60449473 60449494 60449478 60449473 -
cccaggctggagtgcaatggca

SEQ ID NO: 228054 - DNA, 22 bp, Artificial Sequence
  Synthetic oligonucleotide; CTG chr2 60449464 60449485 60449469 60449464 -
gagtgcaatggcacgatcttgg

SEQ ID NO: 228055 - DNA, 22 bp, Artificial Sequence
  Synthetic oligonucleotide; CTT chr2 60449444 60449465 60449449 60449444 -
ggctcactgcaacctctacctc

SEQ ID NO: 228056 - DNA, 22 bp, Artificial Sequence
  Synthetic oligonucleotide; TTG chr2 60449443 60449464 60449448 60449443 -
gctcactgcaacctctacctcc

SEQ ID NO: 228057 - DNA, 22 bp, Artificial Sequence
  Synthetic oligonucleotide; CTC chr2 60449439 60449460 60449444 60449439 -
actgcaacctctacctcccggg

SEQ ID NO: 228058 - DNA, 22 bp, Artificial Sequence
  Synthetic oligonucleotide; CTG chr2 60449435 60449456 60449440 60449435 -
caacctctacctcccgggttca

SEQ ID NO: 228059 - DNA, 22 bp, Artificial Sequence
  Synthetic oligonucleotide; CTC chr2 60449428 60449449 60449433 60449428 -
tacctcccgggttcaagtggtt

SEQ ID NO: 228060 - DNA, 22 bp, Artificial Sequence
  Synthetic oligonucleotide; CTA chr2 60449426 60449447 60449431 60449426 -
cctcccgggttcaagtggttct

SEQ ID NO: 228061 - DNA, 22 bp, Artificial Sequence
  Synthetic oligonucleotide; CTC chr2 60449422 60449443 60449427 60449422 -
ccgggttcaagtggttctcctg

SEQ ID NO: 228062 - DNA, 22 bp, Artificial Sequence
  Synthetic oligonucleotide; TTC chr2 60449414 60449435 60449419 60449414 -
aagtggttctcctgcctcagcc

SEQ ID NO: 228063 - DNA, 22 bp, Artificial Sequence
  Synthetic oligonucleotide; TTC chr2 60449405 60449426 60449410 60449405 -
tcctgcctcagcctcctgagtg

SEQ ID NO: 228064 - DNA, 22 bp, Artificial Sequence
  Synthetic oligonucleotide; CTC chr2 60449403 60449424 60449408 60449403 -
ctgcctcagcctcctgagtggc

SEQ ID NO: 228065 - DNA, 22 bp, Artificial Sequence
  Synthetic oligonucleotide; CTG chr2 60449400 60449421 60449405 60449400 -
cctcagcctcctgagtggctgg

SEQ ID NO: 228066 - DNA, 22 bp, Artificial Sequence
  Synthetic oligonucleotide; CTC chr2 60449396 60449417 60449401 60449396 -
agcctcctgagtggctgggatt

SEQ ID NO: 228067 - DNA, 22 bp, Artificial Sequence
  Synthetic oligonucleotide; CTC chr2 60449390 60449411 60449395 60449390 -
ctgagtggctgggattacaggt

SEQ ID NO: 228068 - DNA, 22 bp, Artificial Sequence
  Synthetic oligonucleotide; CTG chr2 60449387 60449408 60449392 60449387 -
agtggctgggattacaggtgcg

SEQ ID NO: 228069 - DNA, 22 bp, Artificial Sequence
  Synthetic oligonucleotide; CTG chr2 60449379 60449400 60449384 60449379 -
ggattacaggtgcgtaccacct

SEQ ID NO: 228070 - DNA, 22 bp, Artificial Sequence
  Synthetic oligonucleotide; TTA chr2 60449373 60449394 60449378 60449373 -
caggtgcgtaccacctggctaa

SEQ ID NO: 228071 - DNA, 22 bp, Artificial Sequence
  Synthetic oligonucleotide; CTG chr2 60449356 60449377 60449361 60449356 -
gctaatttttgtatttttagta

SEQ ID NO: 228072 - DNA, 22 bp, Artificial Sequence
  Synthetic oligonucleotide; CTA chr2 60449352 60449373 60449357 60449352 -
atttttgtatttttagtagaga

SEQ ID NO: 228073 - DNA, 22 bp, Artificial Sequence
  Synthetic oligonucleotide; TTT chr2 60449348 60449369 60449353 60449348 -
ttgtatttttagtagagacggg

SEQ ID NO: 228074 - DNA, 22 bp, Artificial Sequence
  Synthetic oligonucleotide; TTT chr2 60449347 60449368 60449352 60449347 -
tgtatttttagtagagacgggg

SEQ ID NO: 228075 - DNA, 22 bp, Artificial Sequence
  Synthetic oligonucleotide; TTT chr2 60449346 60449367 60449351 60449346 -
gtatttttagtagagacggggt

SEQ ID NO: 228076 - DNA, 22 bp, Artificial Sequence
  Synthetic oligonucleotide; TTG chr2 60449345 60449366 60449350 60449345 -
tatttttagtagagacggggtt

SEQ ID NO: 228077 - DNA, 22 bp, Artificial Sequence
  Synthetic oligonucleotide; TTT chr2 60449340 60449361 60449345 60449340 -
ttagtagagacggggtttcacc

SEQ ID NO: 228078 - DNA, 22 bp, Artificial Sequence
  Synthetic oligonucleotide; TTT chr2 60449339 60449360 60449344 60449339 -
tagtagagacggggtttcacca

SEQ ID NO: 228079 - DNA, 22 bp, Artificial Sequence
  Synthetic oligonucleotide; TTT chr2 60449338 60449359 60449343 60449338 -
agtagagacggggtttcaccat

SEQ ID NO: 228080 - DNA, 22 bp, Artificial Sequence
  Synthetic oligonucleotide; TTA chr2 60449337 60449358 60449342 60449337 -
gtagagacggggtttcaccatg

SEQ ID NO: 228081 - DNA, 22 bp, Artificial Sequence
  Synthetic oligonucleotide; TTT chr2 60449322 60449343 60449327 60449322 -
caccatgttggtcaggctggtc

SEQ ID NO: 228082 - DNA, 22 bp, Artificial Sequence
  Synthetic oligonucleotide; TTC chr2 60449321 60449342 60449326 60449321 -
accatgttggtcaggctggtct

SEQ ID NO: 228083 - DNA, 22 bp, Artificial Sequence
  Synthetic oligonucleotide; TTG chr2 60449312 60449333 60449317 60449312 -
gtcaggctggtctcgaactcct

SEQ ID NO: 228084 - DNA, 22 bp, Artificial Sequence
  Synthetic oligonucleotide; CTG chr2 60449303 60449324 60449308 60449303 -
gtctcgaactcctgacctcatg

SEQ ID NO: 228085 - DNA, 22 bp, Artificial Sequence
  Synthetic oligonucleotide; CTC chr2 60449298 60449319 60449303 60449298 -
gaactcctgacctcatgagcca

SEQ ID NO: 228086 - DNA, 22 bp, Artificial Sequence
  Synthetic oligonucleotide; CTC chr2 60449292 60449313 60449297 60449292 -
ctgacctcatgagccacctgcc

SEQ ID NO: 228087 - DNA, 22 bp, Artificial Sequence
  Synthetic oligonucleotide; CTG chr2 60449289 60449310 60449294 60449289 -
acctcatgagccacctgcctcg

SEQ ID NO: 228088 - DNA, 22 bp, Artificial Sequence
  Synthetic oligonucleotide; CTC chr2 60449284 60449305 60449289 60449284 -
atgagccacctgcctcggcctc

SEQ ID NO: 228089 - DNA, 22 bp, Artificial Sequence
  Synthetic oligonucleotide; CTG chr2 60449272 60449293 60449277 60449272 -
cctcggcctcccaaagtgctgg

SEQ ID NO: 228090 - DNA, 22 bp, Artificial Sequence
  Synthetic oligonucleotide; CTC chr2 60449268 60449289 60449273 60449268 -
ggcctcccaaagtgctgggatt

SEQ ID NO: 228091 - DNA, 22 bp, Artificial Sequence
  Synthetic oligonucleotide; CTC chr2 60449262 60449283 60449267 60449262 -
ccaaagtgctgggattacaggt

SEQ ID NO: 228092 - DNA, 22 bp, Artificial Sequence
  Synthetic oligonucleotide; CTG chr2 60449251 60449272 60449256 60449251 -
ggattacaggtgtaagccaccg

SEQ ID NO: 228093 - DNA, 22 bp, Artificial Sequence
  Synthetic oligonucleotide; TTA chr2 60449245 60449266 60449250 60449245 -
caggtgtaagccaccgcgcccg

SEQ ID NO: 228094 - DNA, 22 bp, Artificial Sequence
  Synthetic oligonucleotide; TTA chr2 60449214 60449235 60449219 60449214 -
ttacactgtataaaaaaggtct

SEQ ID NO: 228095 - DNA, 22 bp, Artificial Sequence
  Synthetic oligonucleotide; TTA chr2 60449211 60449232 60449216 60449211 -
cactgtataaaaaaggtctgtt

SEQ ID NO: 228096 - DNA, 22 bp, Artificial Sequence
  Synthetic oligonucleotide; CTG chr2 60449206 60449227 60449211 60449206 -
tataaaaaaggtctgttagaat

SEQ ID NO: 228097 - DNA, 22 bp, Artificial Sequence
  Synthetic oligonucleotide; CTG chr2 60449191 60449212 60449196 60449191 -
ttagaattggggtccatgatgg

SEQ ID NO: 228098 - DNA, 22 bp, Artificial Sequence
  Synthetic oligonucleotide; TTA chr2 60449188 60449209 60449193 60449188 -
gaattggggtccatgatgggag

SEQ ID NO: 228099 - DNA, 22 bp, Artificial Sequence
  Synthetic oligonucleotide; TTG chr2 60449182 60449203 60449187 60449182 -
gggtccatgatgggagagaaag

SEQ ID NO: 228100 - DNA, 22 bp, Artificial Sequence
  Synthetic oligonucleotide; CTC chr2 60449154 60449175 60449159 60449154 -
aaagcccctgcagcacccagca

SEQ ID NO: 228101 - DNA, 22 bp, Artificial Sequence
  Synthetic oligonucleotide; CTG chr2 60449144 60449165 60449149 60449144 -
cagcacccagcatccagcatgt

SEQ ID NO: 228102 - DNA, 22 bp, Artificial Sequence
  Synthetic oligonucleotide; TTG chr2 60449120 60449141 60449125 60449120 -
aatatcagcctgtttgagaaat

SEQ ID NO: 228103 - DNA, 22 bp, Artificial Sequence
  Synthetic oligonucleotide; CTG chr2 60449108 60449129 60449113 60449108 -
tttgagaaataattgtttcaaa

SEQ ID NO: 228104 - DNA, 22 bp, Artificial Sequence
  Synthetic oligonucleotide; TTT chr2 60449105 60449126 60449110 60449105 -
gagaaataattgtttcaaaaac

SEQ ID NO: 228105 - DNA, 22 bp, Artificial Sequence
  Synthetic oligonucleotide; TTG chr2 60449104 60449125 60449109 60449104 -
agaaataattgtttcaaaaacc

SEQ ID NO: 228106 - DNA, 22 bp, Artificial Sequence
  Synthetic oligonucleotide; TTG chr2 60449093 60449114 60449098 60449093 -
tttcaaaaaccagtgatcattt

SEQ ID NO: 228107 - DNA, 22 bp, Artificial Sequence
  Synthetic oligonucleotide; TTT chr2 60449090 60449111 60449095 60449090 -
caaaaaccagtgatcatttaaa

SEQ ID NO: 228108 - DNA, 22 bp, Artificial Sequence
  Synthetic oligonucleotide; TTC chr2 60449089 60449110 60449094 60449089 -
aaaaaccagtgatcatttaaag

SEQ ID NO: 228109 - DNA, 22 bp, Artificial Sequence
  Synthetic oligonucleotide; TTT chr2 60449071 60449092 60449076 60449071 -
aaagaaaactcttaggcaagga

SEQ ID NO: 228110 - DNA, 22 bp, Artificial Sequence
  Synthetic oligonucleotide; TTA chr2 60449070 60449091 60449075 60449070 -
aagaaaactcttaggcaaggag

SEQ ID NO: 228111 - DNA, 22 bp, Artificial Sequence
  Synthetic oligonucleotide; CTC chr2 60449060 60449081 60449065 60449060 -
ttaggcaaggagtgcaatcttg

SEQ ID NO: 228112 - DNA, 22 bp, Artificial Sequence
  Synthetic oligonucleotide; CTT chr2 60449058 60449079 60449063 60449058 -
aggcaaggagtgcaatcttgga

SEQ ID NO: 228113 - DNA, 22 bp, Artificial Sequence
  Synthetic oligonucleotide; TTA chr2 60449057 60449078 60449062 60449057 -
ggcaaggagtgcaatcttggaa

SEQ ID NO: 228114 - DNA, 22 bp, Artificial Sequence
  Synthetic oligonucleotide; CTT chr2 60449039 60449060 60449044 60449039 -
ggaatctgctgaggtctaactg

SEQ ID NO: 228115 - DNA, 22 bp, Artificial Sequence
  Synthetic oligonucleotide; TTG chr2 60449038 60449059 60449043 60449038 -
gaatctgctgaggtctaactga

SEQ ID NO: 228116 - DNA, 22 bp, Artificial Sequence
  Synthetic oligonucleotide; CTG chr2 60449031 60449052 60449036 60449031 -
ctgaggtctaactgagtgcccc

SEQ ID NO: 228117 - DNA, 22 bp, Artificial Sequence
  Synthetic oligonucleotide; CTG chr2 60449028 60449049 60449033 60449028 -
aggtctaactgagtgccccaaa

SEQ ID NO: 228118 - DNA, 22 bp, Artificial Sequence
  Synthetic oligonucleotide; CTA chr2 60449021 60449042 60449026 60449021 -
actgagtgccccaaaccttggc

SEQ ID NO: 228119 - DNA, 22 bp, Artificial Sequence
  Synthetic oligonucleotide; CTG chr2 60449017 60449038 60449022 60449017 -
agtgccccaaaccttggcagca

SEQ ID NO: 228120 - DNA, 22 bp, Artificial Sequence
  Synthetic oligonucleotide; CTT chr2 60449002 60449023 60449007 60449002 -
ggcagcatattttctgggcact

SEQ ID NO: 228121 - DNA, 22 bp, Artificial Sequence
  Synthetic oligonucleotide; TTG chr2 60449001 60449022 60449006 60449001 -
gcagcatattttctgggcactt

SEQ ID NO: 228122 - DNA, 22 bp, Artificial Sequence
  Synthetic oligonucleotide; TTT chr2 60448990 60449011 60448995 60448990 -
tctgggcacttttgcttggagt

SEQ ID NO: 228123 - DNA, 22 bp, Artificial Sequence
  Synthetic oligonucleotide; TTT chr2 60448989 60449010 60448994 60448989 -
ctgggcacttttgcttggagtt

SEQ ID NO: 228124 - DNA, 22 bp, Artificial Sequence
  Synthetic oligonucleotide; TTC chr2 60448988 60449009 60448993 60448988 -
tgggcacttttgcttggagttt

SEQ ID NO: 228125 - DNA, 22 bp, Artificial Sequence
  Synthetic oligonucleotide; CTG chr2 60448986 60449007 60448991 60448986 -
ggcacttttgcttggagtttcc

SEQ ID NO: 228126 - DNA, 22 bp, Artificial Sequence
  Synthetic oligonucleotide; CTT chr2 60448979 60449000 60448984 60448979 -
ttgcttggagtttccaagagca

SEQ ID NO: 228127 - DNA, 22 bp, Artificial Sequence
  Synthetic oligonucleotide; TTT chr2 60448978 60448999 60448983 60448978 -
tgcttggagtttccaagagcat

SEQ ID NO: 228128 - DNA, 22 bp, Artificial Sequence
  Synthetic oligonucleotide; TTT chr2 60448977 60448998 60448982 60448977 -
gcttggagtttccaagagcatt

SEQ ID NO: 228129 - DNA, 22 bp, Artificial Sequence
  Synthetic oligonucleotide; TTG chr2 60448976 60448997 60448981 60448976 -
cttggagtttccaagagcattc

SEQ ID NO: 228130 - DNA, 22 bp, Artificial Sequence
  Synthetic oligonucleotide; CTT chr2 60448973 60448994 60448978 60448973 -
ggagtttccaagagcattcaga

SEQ ID NO: 228131 - DNA, 22 bp, Artificial Sequence
  Synthetic oligonucleotide; TTG chr2 60448972 60448993 60448977 60448972 -
gagtttccaagagcattcagat

SEQ ID NO: 228132 - DNA, 22 bp, Artificial Sequence
  Synthetic oligonucleotide; TTT chr2 60448966 60448987 60448971 60448966 -
ccaagagcattcagattaaaac

SEQ ID NO: 228133 - DNA, 22 bp, Artificial Sequence
  Synthetic oligonucleotide; TTC chr2 60448965 60448986 60448970 60448965 -
caagagcattcagattaaaacc

SEQ ID NO: 228134 - DNA, 22 bp, Artificial Sequence
  Synthetic oligonucleotide; TTC chr2 60448954 60448975 60448959 60448954 -
agattaaaaccaagcccttcaa

SEQ ID NO: 228135 - DNA, 22 bp, Artificial Sequence
  Synthetic oligonucleotide; TTA chr2 60448948 60448969 60448953 60448948 -
aaaccaagcccttcaagtggtc

SEQ ID NO: 228136 - DNA, 22 bp, Artificial Sequence
  Synthetic oligonucleotide; CTT chr2 60448935 60448956 60448940 60448935 -
caagtggtcaggaatatctttc

SEQ ID NO: 228137 - DNA, 22 bp, Artificial Sequence
  Synthetic oligonucleotide; TTC chr2 60448934 60448955 60448939 60448934 -
aagtggtcaggaatatctttca

SEQ ID NO: 228138 - DNA, 22 bp, Artificial Sequence
  Synthetic oligonucleotide; CTT chr2 60448915 60448936 60448920 60448915 -
tcaggttttgtatgcgttgaca

SEQ ID NO: 228139 - DNA, 22 bp, Artificial Sequence
  Synthetic oligonucleotide; TTT chr2 60448914 60448935 60448919 60448914 -
caggttttgtatgcgttgacat

SEQ ID NO: 228140 - DNA, 22 bp, Artificial Sequence
  Synthetic oligonucleotide; TTC chr2 60448913 60448934 60448918 60448913 -
aggttttgtatgcgttgacatg

SEQ ID NO: 228141 - DNA, 22 bp, Artificial Sequence
  Synthetic oligonucleotide; TTT chr2 60448907 60448928 60448912 60448907 -
tgtatgcgttgacatgattttt

SEQ ID NO: 228142 - DNA, 22 bp, Artificial Sequence
  Synthetic oligonucleotide; TTT chr2 60448906 60448927 60448911 60448906 -
gtatgcgttgacatgatttttt

SEQ ID NO: 228143 - DNA, 22 bp, Artificial Sequence
  Synthetic oligonucleotide; TTG chr2 60448905 60448926 60448910 60448905 -
tatgcgttgacatgattttttt

SEQ ID NO: 228144 - DNA, 22 bp, Artificial Sequence
  Synthetic oligonucleotide; TTG chr2 60448896 60448917 60448901 60448896 -
acatgatttttttttttttttg

SEQ ID NO: 228145 - DNA, 22 bp, Artificial Sequence
  Synthetic oligonucleotide; TTT chr2 60448887 60448908 60448892 60448887 -
ttttttttttttgatagtgagg

SEQ ID NO: 228146 - DNA, 22 bp, Artificial Sequence
  Synthetic oligonucleotide; TTT chr2 60448886 60448907 60448891 60448886 -
tttttttttttgatagtgaggt

SEQ ID NO: 228147 - DNA, 22 bp, Artificial Sequence
  Synthetic oligonucleotide; TTT chr2 60448885 60448906 60448890 60448885 -
ttttttttttgatagtgaggtt

SEQ ID NO: 228148 - DNA, 22 bp, Artificial Sequence
  Synthetic oligonucleotide; TTT chr2 60448884 60448905 60448889 60448884 -
tttttttttgatagtgaggtta

SEQ ID NO: 228149 - DNA, 22 bp, Artificial Sequence
  Synthetic oligonucleotide; TTT chr2 60448883 60448904 60448888 60448883 -
ttttttttgatagtgaggttaa

SEQ ID NO: 228150 - DNA, 22 bp, Artificial Sequence
  Synthetic oligonucleotide; TTT chr2 60448882 60448903 60448887 60448882 -
tttttttgatagtgaggttaac

SEQ ID NO: 228151 - DNA, 22 bp, Artificial Sequence
  Synthetic oligonucleotide; TTT chr2 60448881 60448902 60448886 60448881 -
ttttttgatagtgaggttaaca

SEQ ID NO: 228152 - DNA, 22 bp, Artificial Sequence
  Synthetic oligonucleotide; TTT chr2 60448880 60448901 60448885 60448880 -
tttttgatagtgaggttaacat

SEQ ID NO: 228153 - DNA, 22 bp, Artificial Sequence
  Synthetic oligonucleotide; TTT chr2 60448879 60448900 60448884 60448879 -
ttttgatagtgaggttaacatt

SEQ ID NO: 228154 - DNA, 22 bp, Artificial Sequence
  Synthetic oligonucleotide; TTT chr2 60448878 60448899 60448883 60448878 -
tttgatagtgaggttaacattg

SEQ ID NO: 228155 - DNA, 22 bp, Artificial Sequence
  Synthetic oligonucleotide; TTT chr2 60448877 60448898 60448882 60448877 -
ttgatagtgaggttaacattga

SEQ ID NO: 228156 - DNA, 22 bp, Artificial Sequence
  Synthetic oligonucleotide; TTT chr2 60448876 60448897 60448881 60448876 -
tgatagtgaggttaacattgac

SEQ ID NO: 228157 - DNA, 22 bp, Artificial Sequence
  Synthetic oligonucleotide; TTT chr2 60448875 60448896 60448880 60448875 -
gatagtgaggttaacattgacg

SEQ ID NO: 228158 - DNA, 22 bp, Artificial Sequence
  Synthetic oligonucleotide; TTG chr2 60448874 60448895 60448879 60448874 -
atagtgaggttaacattgacga

SEQ ID NO: 228159 - DNA, 22 bp, Artificial Sequence
  Synthetic oligonucleotide; TTA chr2 60448862 60448883 60448867 60448862 -
acattgacgaagatggctatat

SEQ ID NO: 228160 - DNA, 22 bp, Artificial Sequence
  Synthetic oligonucleotide; TTG chr2 60448856 60448877 60448861 60448856 -
acgaagatggctatatttattc

SEQ ID NO: 228161 - DNA, 22 bp, Artificial Sequence
  Synthetic oligonucleotide; CTA chr2 60448843 60448864 60448848 60448843 -
tatttattcctatttttaaaaa

SEQ ID NO: 228162 - DNA, 22 bp, Artificial Sequence
  Synthetic oligonucleotide; TTT chr2 60448838 60448859 60448843 60448838 -
attcctatttttaaaaattctt

SEQ ID NO: 228163 - DNA, 22 bp, Artificial Sequence
  Synthetic oligonucleotide; TTA chr2 60448837 60448858 60448842 60448837 -
ttcctatttttaaaaattctta

SEQ ID NO: 228164 - DNA, 22 bp, Artificial Sequence
  Synthetic oligonucleotide; TTC chr2 60448834 60448855 60448839 60448834 -
ctatttttaaaaattcttattt

SEQ ID NO: 228165 - DNA, 22 bp, Artificial Sequence
  Synthetic oligonucleotide; CTA chr2 60448831 60448852 60448836 60448831 -
tttttaaaaattcttattttat

SEQ ID NO: 228166 - DNA, 22 bp, Artificial Sequence
  Synthetic oligonucleotide; TTT chr2 60448828 60448849 60448833 60448828 -
ttaaaaattcttattttataat

SEQ ID NO: 228167 - DNA, 22 bp, Artificial Sequence
  Synthetic oligonucleotide; TTT chr2 60448827 60448848 60448832 60448827 -
taaaaattcttattttataatt

SEQ ID NO: 228168 - DNA, 22 bp, Artificial Sequence
  Synthetic oligonucleotide; TTT chr2 60448826 60448847 60448831 60448826 -
aaaaattcttattttataattc

SEQ ID NO: 228169 - DNA, 22 bp, Artificial Sequence
  Synthetic oligonucleotide; TTA chr2 60448825 60448846 60448830 60448825 -
aaaattcttattttataattct

SEQ ID NO: 228170 - DNA, 22 bp, Artificial Sequence
  Synthetic oligonucleotide; TTC chr2 60448818 60448839 60448823 60448818 -
ttattttataattcttatttta

SEQ ID NO: 228171 - DNA, 22 bp, Artificial Sequence
  Synthetic oligonucleotide; CTT chr2 60448816 60448837 60448821 60448816 -
attttataattcttattttata

SEQ ID NO: 228172 - DNA, 22 bp, Artificial Sequence
  Synthetic oligonucleotide; TTA chr2 60448815 60448836 60448820 60448815 -
ttttataattcttattttataa

SEQ ID NO: 228173 - DNA, 22 bp, Artificial Sequence
  Synthetic oligonucleotide; TTT chr2 60448812 60448833 60448817 60448812 -
tataattcttattttataaatc

SEQ ID NO: 228174 - DNA, 22 bp, Artificial Sequence
  Synthetic oligonucleotide; TTT chr2 60448811 60448832 60448816 60448811 -
ataattcttattttataaatca

SEQ ID NO: 228175 - DNA, 22 bp, Artificial Sequence
  Synthetic oligonucleotide; TTA chr2 60448810 60448831 60448815 60448810 -
taattcttattttataaatcag

SEQ ID NO: 228176 - DNA, 22 bp, Artificial Sequence
  Synthetic oligonucleotide; TTC chr2 60448804 60448825 60448809 60448804 -
ttattttataaatcagtgtccc

SEQ ID NO: 228177 - DNA, 22 bp, Artificial Sequence
  Synthetic oligonucleotide; CTT chr2 60448802 60448823 60448807 60448802 -
attttataaatcagtgtccccg

SEQ ID NO: 228178 - DNA, 22 bp, Artificial Sequence
  Synthetic oligonucleotide; TTA chr2 60448801 60448822 60448806 60448801 -
ttttataaatcagtgtccccgg

SEQ ID NO: 228179 - DNA, 22 bp, Artificial Sequence
  Synthetic oligonucleotide; TTT chr2 60448798 60448819 60448803 60448798 -
tataaatcagtgtccccggaag

SEQ ID NO: 228180 - DNA, 22 bp, Artificial Sequence
  Synthetic oligonucleotide; TTT chr2 60448797 60448818 60448802 60448797 -
ataaatcagtgtccccggaagt

SEQ ID NO: 228181 - DNA, 22 bp, Artificial Sequence
  Synthetic oligonucleotide; TTA chr2 60448796 60448817 60448801 60448796 -
taaatcagtgtccccggaagta

SEQ ID NO: 228182 - DNA, 22 bp, Artificial Sequence
  Synthetic oligonucleotide; TTA chr2 60448762 60448783 60448767 60448762 -
gaatggaagtattttgtaggct

SEQ ID NO: 228183 - DNA, 22 bp, Artificial Sequence
  Synthetic oligonucleotide; TTT chr2 60448748 60448769 60448753 60448748 -
tgtaggctgttggttctgttct

SEQ ID NO: 228184 - DNA, 22 bp, Artificial Sequence
  Synthetic oligonucleotide; TTT chr2 60448747 60448768 60448752 60448747 -
gtaggctgttggttctgttctt

SEQ ID NO: 228185 - DNA, 22 bp, Artificial Sequence
  Synthetic oligonucleotide; TTG chr2 60448746 60448767 60448751 60448746 -
taggctgttggttctgttctta

SEQ ID NO: 228186 - DNA, 22 bp, Artificial Sequence
  Synthetic oligonucleotide; CTG chr2 60448739 60448760 60448744 60448739 -
ttggttctgttcttacagtatg

SEQ ID NO: 228187 - DNA, 22 bp, Artificial Sequence
  Synthetic oligonucleotide; TTG chr2 60448736 60448757 60448741 60448736 -
gttctgttcttacagtatgcca

SEQ ID NO: 228188 - DNA, 22 bp, Artificial Sequence
  Synthetic oligonucleotide; TTC chr2 60448732 60448753 60448737 60448732 -
tgttcttacagtatgccacata

SEQ ID NO: 228189 - DNA, 22 bp, Artificial Sequence
  Synthetic oligonucleotide; CTG chr2 60448730 60448751 60448735 60448730 -
ttcttacagtatgccacatagc

SEQ ID NO: 228190 - DNA, 22 bp, Artificial Sequence
  Synthetic oligonucleotide; TTC chr2 60448727 60448748 60448732 60448727 -
ttacagtatgccacatagcttt

SEQ ID NO: 228191 - DNA, 22 bp, Artificial Sequence
  Synthetic oligonucleotide; CTT chr2 60448725 60448746 60448730 60448725 -
acagtatgccacatagctttga

SEQ ID NO: 228192 - DNA, 22 bp, Artificial Sequence
  Synthetic oligonucleotide; TTA chr2 60448724 60448745 60448729 60448724 -
cagtatgccacatagctttgac

SEQ ID NO: 228193 - DNA, 22 bp, Artificial Sequence
  Synthetic oligonucleotide; CTT chr2 60448706 60448727 60448711 60448706 -
tgactccttttggagtatagtg

SEQ ID NO: 228194 - DNA, 22 bp, Artificial Sequence
  Synthetic oligonucleotide; TTT chr2 60448705 60448726 60448710 60448705 -
gactccttttggagtatagtgt

SEQ ID NO: 228195 - DNA, 22 bp, Artificial Sequence
  Synthetic oligonucleotide; TTG chr2 60448704 60448725 60448709 60448704 -
actccttttggagtatagtgtg

SEQ ID NO: 228196 - DNA, 22 bp, Artificial Sequence
  Synthetic oligonucleotide; CTC chr2 60448700 60448721 60448705 60448700 -
cttttggagtatagtgtgaagg

SEQ ID NO: 228197 - DNA, 22 bp, Artificial Sequence
  Synthetic oligonucleotide; CTT chr2 60448697 60448718 60448702 60448697 -
ttggagtatagtgtgaaggaag

SEQ ID NO: 228198 - DNA, 22 bp, Artificial Sequence
  Synthetic oligonucleotide; TTT chr2 60448696 60448717 60448701 60448696 -
tggagtatagtgtgaaggaagc

SEQ ID NO: 228199 - DNA, 22 bp, Artificial Sequence
  Synthetic oligonucleotide; TTT chr2 60448695 60448716 60448700 60448695 -
ggagtatagtgtgaaggaagca

SEQ ID NO: 228200 - DNA, 22 bp, Artificial Sequence
  Synthetic oligonucleotide; TTG chr2 60448694 60448715 60448699 60448694 -
gagtatagtgtgaaggaagcag

SEQ ID NO: 228201 - DNA, 22 bp, Artificial Sequence
  Synthetic oligonucleotide; TTT chr2 60448668 60448689 60448673 60448668 -
gaggaattttgagtctggtgga

SEQ ID NO: 228202 - DNA, 22 bp, Artificial Sequence
  Synthetic oligonucleotide; TTG chr2 60448667 60448688 60448672 60448667 -
aggaattttgagtctggtggaa

SEQ ID NO: 228203 - DNA, 22 bp, Artificial Sequence
  Synthetic oligonucleotide; TTT chr2 60448659 60448680 60448664 60448659 -
tgagtctggtggaagttccaaa

SEQ ID NO: 228204 - DNA, 22 bp, Artificial Sequence
  Synthetic oligonucleotide; TTT chr2 60448658 60448679 60448663 60448658 -
gagtctggtggaagttccaaaa

SEQ ID NO: 228205 - DNA, 22 bp, Artificial Sequence
  Synthetic oligonucleotide; TTG chr2 60448657 60448678 60448662 60448657 -
agtctggtggaagttccaaaat

SEQ ID NO: 228206 - DNA, 22 bp, Artificial Sequence
  Synthetic oligonucleotide; CTG chr2 60448651 60448672 60448656 60448651 -
gtggaagttccaaaataactgg

SEQ ID NO: 228207 - DNA, 22 bp, Artificial Sequence
  Synthetic oligonucleotide; TTC chr2 60448641 60448662 60448646 60448641 -
caaaataactggtgatgcaagc

SEQ ID NO: 228208 - DNA, 22 bp, Artificial Sequence
  Synthetic oligonucleotide; CTG chr2 60448630 60448651 60448635 60448630 -
gtgatgcaagcacaccttcctt

SEQ ID NO: 228209 - DNA, 22 bp, Artificial Sequence
  Synthetic oligonucleotide; CTT chr2 60448612 60448633 60448617 60448612 -
ccttcttcaagagttcatcttg

SEQ ID NO: 228210 - DNA, 22 bp, Artificial Sequence
  Synthetic oligonucleotide; TTC chr2 60448611 60448632 60448616 60448611 -
cttcttcaagagttcatcttga

SEQ ID NO: 228211 - DNA, 22 bp, Artificial Sequence
  Synthetic oligonucleotide; CTT chr2 60448608 60448629 60448613 60448608 -
cttcaagagttcatcttgagtt

SEQ ID NO: 228212 - DNA, 22 bp, Artificial Sequence
  Synthetic oligonucleotide; TTC chr2 60448607 60448628 60448612 60448607 -
ttcaagagttcatcttgagttc

SEQ ID NO: 228213 - DNA, 22 bp, Artificial Sequence
  Synthetic oligonucleotide; CTT chr2 60448605 60448626 60448610 60448605 -
caagagttcatcttgagttcct

SEQ ID NO: 228214 - DNA, 22 bp, Artificial Sequence
  Synthetic oligonucleotide; TTC chr2 60448604 60448625 60448609 60448604 -
aagagttcatcttgagttccta

SEQ ID NO: 228215 - DNA, 22 bp, Artificial Sequence
  Synthetic oligonucleotide; TTC chr2 60448596 60448617 60448601 60448596 -
atcttgagttcctaaccagcag

SEQ ID NO: 228216 - DNA, 22 bp, Artificial Sequence
  Synthetic oligonucleotide; CTT chr2 60448591 60448612 60448596 60448591 -
gagttcctaaccagcagagaaa

SEQ ID NO: 228217 - DNA, 22 bp, Artificial Sequence
  Synthetic oligonucleotide; TTG chr2 60448590 60448611 60448595 60448590 -
agttcctaaccagcagagaaac

SEQ ID NO: 228218 - DNA, 22 bp, Artificial Sequence
  Synthetic oligonucleotide; TTC chr2 60448585 60448606 60448590 60448585 -
ctaaccagcagagaaacaatat

SEQ ID NO: 228219 - DNA, 22 bp, Artificial Sequence
  Synthetic oligonucleotide; CTA chr2 60448582 60448603 60448587 60448582 -
accagcagagaaacaatattat

SEQ ID NO: 228220 - DNA, 22 bp, Artificial Sequence
  Synthetic oligonucleotide; TTA chr2 60448561 60448582 60448566 60448561 -
tatttctttcctctgactgcct

SEQ ID NO: 228221 - DNA, 22 bp, Artificial Sequence
  Synthetic oligonucleotide; TTT chr2 60448556 60448577 60448561 60448556 -
ctttcctctgactgcctaggag

SEQ ID NO: 228222 - DNA, 22 bp, Artificial Sequence
  Synthetic oligonucleotide; TTC chr2 60448555 60448576 60448560 60448555 -
tttcctctgactgcctaggaga

SEQ ID NO: 228223 - DNA, 22 bp, Artificial Sequence
  Synthetic oligonucleotide; CTT chr2 60448553 60448574 60448558 60448553 -
tcctctgactgcctaggagaga

SEQ ID NO: 228224 - DNA, 22 bp, Artificial Sequence
  Synthetic oligonucleotide; TTT chr2 60448552 60448573 60448557 60448552 -
cctctgactgcctaggagagac

SEQ ID NO: 228225 - DNA, 22 bp, Artificial Sequence
  Synthetic oligonucleotide; TTC chr2 60448551 60448572 60448556 60448551 -
ctctgactgcctaggagagaca

SEQ ID NO: 228226 - DNA, 22 bp, Artificial Sequence
  Synthetic oligonucleotide; CTC chr2 60448548 60448569 60448553 60448548 -
tgactgcctaggagagacagta

SEQ ID NO: 228227 - DNA, 22 bp, Artificial Sequence
  Synthetic oligonucleotide; CTG chr2 60448546 60448567 60448551 60448546 -
actgcctaggagagacagtact

SEQ ID NO: 228228 - DNA, 22 bp, Artificial Sequence
  Synthetic oligonucleotide; CTG chr2 60448542 60448563 60448547 60448542 -
cctaggagagacagtactcttc

SEQ ID NO: 228229 - DNA, 22 bp, Artificial Sequence
  Synthetic oligonucleotide; CTA chr2 60448538 60448559 60448543 60448538 -
ggagagacagtactcttcagtt

SEQ ID NO: 228230 - DNA, 22 bp, Artificial Sequence
  Synthetic oligonucleotide; CTC chr2 60448523 60448544 60448528 60448523 -
ttcagtttgcattcccctggag

SEQ ID NO: 228231 - DNA, 22 bp, Artificial Sequence
  Synthetic oligonucleotide; CTT chr2 60448521 60448542 60448526 60448521 -
cagtttgcattcccctggagtt

SEQ ID NO: 228232 - DNA, 22 bp, Artificial Sequence
  Synthetic oligonucleotide; TTC chr2 60448520 60448541 60448525 60448520 -
agtttgcattcccctggagtta

SEQ ID NO: 228233 - DNA, 22 bp, Artificial Sequence
  Synthetic oligonucleotide; TTT chr2 60448515 60448536 60448520 60448515 -
gcattcccctggagttacatta

SEQ ID NO: 228234 - DNA, 22 bp, Artificial Sequence
  Synthetic oligonucleotide; TTG chr2 60448514 60448535 60448519 60448514 -
cattcccctggagttacattaa

SEQ ID NO: 228235 - DNA, 22 bp, Artificial Sequence
  Synthetic oligonucleotide; TTC chr2 60448509 60448530 60448514 60448509 -
ccctggagttacattaagtcat

SEQ ID NO: 228236 - DNA, 22 bp, Artificial Sequence
  Synthetic oligonucleotide; CTG chr2 60448504 60448525 60448509 60448504 -
gagttacattaagtcatggaac

SEQ ID NO: 228237 - DNA, 22 bp, Artificial Sequence
  Synthetic oligonucleotide; TTA chr2 60448498 60448519 60448503 60448498 -
cattaagtcatggaacttctca

SEQ ID NO: 228238 - DNA, 22 bp, Artificial Sequence
  Synthetic oligonucleotide; TTA chr2 60448493 60448514 60448498 60448493 -
agtcatggaacttctcacttcc

SEQ ID NO: 228239 - DNA, 22 bp, Artificial Sequence
  Synthetic oligonucleotide; CTT chr2 60448480 60448501 60448485 60448480 -
ctcacttccagtaaaatccaga

SEQ ID NO: 228240 - DNA, 22 bp, Artificial Sequence
  Synthetic oligonucleotide; TTC chr2 60448479 60448500 60448484 60448479 -
tcacttccagtaaaatccagaa

SEQ ID NO: 228241 - DNA, 22 bp, Artificial Sequence
  Synthetic oligonucleotide; CTC chr2 60448477 60448498 60448482 60448477 -
acttccagtaaaatccagaagc

SEQ ID NO: 228242 - DNA, 22 bp, Artificial Sequence
  Synthetic oligonucleotide; CTT chr2 60448473 60448494 60448478 60448473 -
ccagtaaaatccagaagcagtc

SEQ ID NO: 228243 - DNA, 22 bp, Artificial Sequence
  Synthetic oligonucleotide; TTC chr2 60448472 60448493 60448477 60448472 -
cagtaaaatccagaagcagtca

SEQ ID NO: 228244 - DNA, 22 bp, Artificial Sequence
  Synthetic oligonucleotide; TTG chr2 60448447 60448468 60448452 60448447 -
tctgtttttctatcttagttta

SEQ ID NO: 228245 - DNA, 22 bp, Artificial Sequence
  Synthetic oligonucleotide; CTG chr2 60448443 60448464 60448448 60448443 -
tttttctatcttagtttaaatt

SEQ ID NO: 228246 - DNA, 22 bp, Artificial Sequence
  Synthetic oligonucleotide; TTT chr2 60448440 60448461 60448445 60448440 -
ttctatcttagtttaaattagg

SEQ ID NO: 228247 - DNA, 22 bp, Artificial Sequence
  Synthetic oligonucleotide; TTT chr2 60448439 60448460 60448444 60448439 -
tctatcttagtttaaattagga

SEQ ID NO: 228248 - DNA, 22 bp, Artificial Sequence
  Synthetic oligonucleotide; TTT chr2 60448438 60448459 60448443 60448438 -
ctatcttagtttaaattaggat

SEQ ID NO: 228249 - DNA, 22 bp, Artificial Sequence
  Synthetic oligonucleotide; TTC chr2 60448437 60448458 60448442 60448437 -
tatcttagtttaaattaggata

SEQ ID NO: 228250 - DNA, 22 bp, Artificial Sequence
  Synthetic oligonucleotide; CTA chr2 60448435 60448456 60448440 60448435 -
tcttagtttaaattaggatatc

SEQ ID NO: 228251 - DNA, 22 bp, Artificial Sequence
  Synthetic oligonucleotide; CTT chr2 60448431 60448452 60448436 60448431 -
agtttaaattaggatatcttat

SEQ ID NO: 228252 - DNA, 22 bp, Artificial Sequence
  Synthetic oligonucleotide; TTA chr2 60448430 60448451 60448435 60448430 -
gtttaaattaggatatcttatt

SEQ ID NO: 228253 - DNA, 22 bp, Artificial Sequence
  Synthetic oligonucleotide; TTT chr2 60448426 60448447 60448431 60448426 -
aaattaggatatcttattacga

SEQ ID NO: 228254 - DNA, 22 bp, Artificial Sequence
  Synthetic oligonucleotide; TTA chr2 60448425 60448446 60448430 60448425 -
aattaggatatcttattacgaa

SEQ ID NO: 228255 - DNA, 22 bp, Artificial Sequence
  Synthetic oligonucleotide; TTA chr2 60448420 60448441 60448425 60448420 -
ggatatcttattacgaaccaca

SEQ ID NO: 228256 - DNA, 22 bp, Artificial Sequence
  Synthetic oligonucleotide; CTT chr2 60448411 60448432 60448416 60448411 -
attacgaaccacatggcctttc

SEQ ID NO: 228257 - DNA, 22 bp, Artificial Sequence
  Synthetic oligonucleotide; TTA chr2 60448410 60448431 60448415 60448410 -
ttacgaaccacatggcctttct

SEQ ID NO: 228258 - DNA, 22 bp, Artificial Sequence
  Synthetic oligonucleotide; TTA chr2 60448407 60448428 60448412 60448407 -
cgaaccacatggcctttctttt

SEQ ID NO: 228259 - DNA, 22 bp, Artificial Sequence
  Synthetic oligonucleotide; CTT chr2 60448391 60448412 60448396 60448391 -
tctttttgctttgtattttaaa

SEQ ID NO: 228260 - DNA, 22 bp, Artificial Sequence
  Synthetic oligonucleotide; TTT chr2 60448390 60448411 60448395 60448390 -
ctttttgctttgtattttaaaa

SEQ ID NO: 228261 - DNA, 22 bp, Artificial Sequence
  Synthetic oligonucleotide; TTC chr2 60448389 60448410 60448394 60448389 -
tttttgctttgtattttaaaaa

SEQ ID NO: 228262 - DNA, 22 bp, Artificial Sequence
  Synthetic oligonucleotide; CTT chr2 60448387 60448408 60448392 60448387 -
tttgctttgtattttaaaaaat

SEQ ID NO: 228263 - DNA, 22 bp, Artificial Sequence
  Synthetic oligonucleotide; TTT chr2 60448386 60448407 60448391 60448386 -
ttgctttgtattttaaaaaatg

SEQ ID NO: 228264 - DNA, 22 bp, Artificial Sequence
  Synthetic oligonucleotide; TTT chr2 60448385 60448406 60448390 60448385 -
tgctttgtattttaaaaaatgc

SEQ ID NO: 228265 - DNA, 22 bp, Artificial Sequence
  Synthetic oligonucleotide; TTT chr2 60448384 60448405 60448389 60448384 -
gctttgtattttaaaaaatgct

SEQ ID NO: 228266 - DNA, 22 bp, Artificial Sequence
  Synthetic oligonucleotide; TTG chr2 60448383 60448404 60448388 60448383 -
ctttgtattttaaaaaatgctc

SEQ ID NO: 228267 - DNA, 22 bp, Artificial Sequence
  Synthetic oligonucleotide; CTT chr2 60448380 60448401 60448385 60448380 -
tgtattttaaaaaatgctccca

SEQ ID NO: 228268 - DNA, 22 bp, Artificial Sequence
  Synthetic oligonucleotide; TTT chr2 60448379 60448400 60448384 60448379 -
gtattttaaaaaatgctcccag

SEQ ID NO: 228269 - DNA, 22 bp, Artificial Sequence
  Synthetic oligonucleotide; TTG chr2 60448378 60448399 60448383 60448378 -
tattttaaaaaatgctcccagg

SEQ ID NO: 228270 - DNA, 22 bp, Artificial Sequence
  Synthetic oligonucleotide; TTT chr2 60448373 60448394 60448378 60448373 -
taaaaaatgctcccaggaagta

SEQ ID NO: 228271 - DNA, 22 bp, Artificial Sequence
  Synthetic oligonucleotide; TTT chr2 60448372 60448393 60448377 60448372 -
aaaaaatgctcccaggaagtac

SEQ ID NO: 228272 - DNA, 22 bp, Artificial Sequence
  Synthetic oligonucleotide; TTA chr2 60448371 60448392 60448376 60448371 -
aaaaatgctcccaggaagtact

SEQ ID NO: 228273 - DNA, 22 bp, Artificial Sequence
  Synthetic oligonucleotide; CTC chr2 60448361 60448382 60448366 60448361 -
ccaggaagtacttaagctttat

SEQ ID NO: 228274 - DNA, 22 bp, Artificial Sequence
  Synthetic oligonucleotide; CTT chr2 60448348 60448369 60448353 60448348 -
aagctttatagaatacttttat

SEQ ID NO: 228275 - DNA, 22 bp, Artificial Sequence
  Synthetic oligonucleotide; TTA chr2 60448347 60448368 60448352 60448347 -
agctttatagaatacttttata

SEQ ID NO: 228276 - DNA, 22 bp, Artificial Sequence
  Synthetic oligonucleotide; CTT chr2 60448342 60448363 60448347 60448342 -
tatagaatacttttatatacat

SEQ ID NO: 228277 - DNA, 22 bp, Artificial Sequence
  Synthetic oligonucleotide; TTT chr2 60448341 60448362 60448346 60448341 -
atagaatacttttatatacatg

SEQ ID NO: 228278 - DNA, 22 bp, Artificial Sequence
  Synthetic oligonucleotide; TTA chr2 60448340 60448361 60448345 60448340 -
tagaatacttttatatacatga

SEQ ID NO: 228279 - DNA, 22 bp, Artificial Sequence
  Synthetic oligonucleotide; CTT chr2 60448330 60448351 60448335 60448330 -
ttatatacatgatagaatcaat

SEQ ID NO: 228280 - DNA, 22 bp, Artificial Sequence
  Synthetic oligonucleotide; TTT chr2 60448329 60448350 60448334 60448329 -
tatatacatgatagaatcaatt

SEQ ID NO: 228281 - DNA, 22 bp, Artificial Sequence
  Synthetic oligonucleotide; TTT chr2 60448328 60448349 60448333 60448328 -
atatacatgatagaatcaattt

SEQ ID NO: 228282 - DNA, 22 bp, Artificial Sequence
  Synthetic oligonucleotide; TTA chr2 60448327 60448348 60448332 60448327 -
tatacatgatagaatcaatttt

SEQ ID NO: 228283 - DNA, 22 bp, Artificial Sequence
  Synthetic oligonucleotide; TTT chr2 60448306 60448327 60448311 60448306 -
tccttgtgattctataaattag

SEQ ID NO: 228284 - DNA, 22 bp, Artificial Sequence
  Synthetic oligonucleotide; TTT chr2 60448305 60448326 60448310 60448305 -
ccttgtgattctataaattaga

SEQ ID NO: 228285 - DNA, 22 bp, Artificial Sequence
  Synthetic oligonucleotide; TTC chr2 60448304 60448325 60448309 60448304 -
cttgtgattctataaattagat

SEQ ID NO: 228286 - DNA, 22 bp, Artificial Sequence
  Synthetic oligonucleotide; CTT chr2 60448301 60448322 60448306 60448301 -
gtgattctataaattagataag

SEQ ID NO: 228287 - DNA, 22 bp, Artificial Sequence
  Synthetic oligonucleotide; TTG chr2 60448300 60448321 60448305 60448300 -
tgattctataaattagataaga

SEQ ID NO: 228288 - DNA, 22 bp, Artificial Sequence
  Synthetic oligonucleotide; TTC chr2 60448294 60448315 60448299 60448294 -
tataaattagataagaaaagaa

SEQ ID NO: 228289 - DNA, 22 bp, Artificial Sequence
  Synthetic oligonucleotide; CTA chr2 60448292 60448313 60448297 60448292 -
taaattagataagaaaagaata

SEQ ID NO: 228290 - DNA, 22 bp, Artificial Sequence
  Synthetic oligonucleotide; TTA chr2 60448285 60448306 60448290 60448285 -
gataagaaaagaatagactgaa

SEQ ID NO: 228291 - DNA, 22 bp, Artificial Sequence
  Synthetic oligonucleotide; CTG chr2 60448265 60448286 60448270 60448265 -
aagttgaaaggaatcctagtaa

SEQ ID NO: 228292 - DNA, 22 bp, Artificial Sequence
  Synthetic oligonucleotide; TTG chr2 60448259 60448280 60448264 60448259 -
aaaggaatcctagtaatcactc

SEQ ID NO: 228293 - DNA, 22 bp, Artificial Sequence
  Synthetic oligonucleotide; CTA chr2 60448247 60448268 60448252 60448247 -
gtaatcactcattttagagatc

SEQ ID NO: 228294 - DNA, 22 bp, Artificial Sequence
  Synthetic oligonucleotide; CTC chr2 60448237 60448258 60448242 60448237 -
attttagagatcagaataataa

SEQ ID NO: 228295 - DNA, 22 bp, Artificial Sequence
  Synthetic oligonucleotide; TTT chr2 60448233 60448254 60448238 60448233 -
tagagatcagaataataagggc

SEQ ID NO: 228296 - DNA, 22 bp, Artificial Sequence
  Synthetic oligonucleotide; TTT chr2 60448232 60448253 60448237 60448232 -
agagatcagaataataagggcc

SEQ ID NO: 228297 - DNA, 22 bp, Artificial Sequence
  Synthetic oligonucleotide; TTA chr2 60448231 60448252 60448236 60448231 -
gagatcagaataataagggccc

SEQ ID NO: 228298 - DNA, 22 bp, Artificial Sequence
  Synthetic oligonucleotide; TTA chr2 60448201 60448222 60448206 60448201 -
agtgaagtacctaagatcacag

SEQ ID NO: 228299 - DNA, 22 bp, Artificial Sequence
  Synthetic oligonucleotide; CTA chr2 60448188 60448209 60448193 60448188 -
agatcacagtgtgaaaaaaaca

SEQ ID NO: 228300 - protein, 9 aa, Artificial Sequence
  Synthetic "LAGLIDADG" family peptide motif sequence
LAGLIDADG

SEQ ID NO: 228301 - RNA, 23 nt, Artificial Sequence
  Synthetic oligonucleotide
  modified_base (1)..(21): Synthetic oligonucleotide; A, c, u, g, unknown or other
  misc_feature (1)..(21): n is a, c, g, or u
nnnnnnnnnnnnnnnnnnnnnrg

SEQ ID NO: 228302 - RNA, 100 nt, Artificial Sequence
  Synthetic polynucleotide
  modified_base (1)..(20): Synthetic oligonucleotide; A, c, u, g, unknown or other
  misc_feature (1)..(20): n is a, c, g, or u
nnnnnnnnnnnnnnnnnnnnguuuuagagcuagaaauagcaaguuaaaauaaggcuaguccguuaucaacuugaaaaaguggcaccgagucggugcuuuu

SEQ ID NO: 228303 - RNA, 96 nt, Artificial Sequence
  Synthetic oligonucleotide
  modified_base (1)..(20): Synthetic oligonucleotide; A, c, u, g, unknown or other
  misc_feature (1)..(20): n is a, c, g, or u
nnnnnnnnnnnnnnnnnnnnguuuuagagcuagaaauagcaaguuaaaauaaggcuaguccguuaucaacuugaaaaaguggcaccgagucggugc

SEQ ID NO: 228304 - RNA, 114 nt, Artificial Sequence
  Synthetic polynucleotide
  modified_base (1)..(30): Synthetic oligonucleotide; A, c, u, g, unknown or other
  misc_feature (1)..(30): Synthetic oligonucleotide; This region may encompass 17-30 nucleotides
  misc_feature (107)..(114): Synthetic oligonucleotide; This region may encompass 1-8 nucleotides
nnnnnnnnnnnnnnnnnnnnnnnnnnnnnnguuuuagagcuagaaauagcaaguuaaaauaaggcuaguccguuaucaacuugaaaaaguggcaccgagucggugcuuuuuuuu
